(19) United States
(12) Patent Application Publication
(10) Pub. No.: US 2004/0235026 A1
(43) Pub. Date: Nov. 25, 2004

(54) Nucleic acids containing single nucleotide polymorphisms and methods of use thereof

(75) Inventors: Richard A. Shimkets, West Haven, CT (US); Martin Leach, Madison, CT (US)

Correspondence Address: Jenell Lawson, Intellectual Property, CuraGen Corporation, 555 Long Wharf Drive, New Haven, CT, 06511, US

(73) Assignee: CuraGen Corporation, New Haven, CT

(21) Appl. No.: 10/813,638

(22) Filed: Mar. 29, 2004

Related U.S. Application Data
(62) Division of application No. 09/718,321, filed on Nov. 22, 2000.
(60) Provisional application No. 60/167,383, filed on Nov. 24, 1999.

(51) Int. Cl. C12Q 1/68; C07H 21/04

(52) U.S. Cl. 435/6; 536/23.1

(57) ABSTRACT

The invention provides nucleic acids containing single-nucleotide polymorphisms identified for transcribed human sequences, as well as methods of using the nucleic acids.

### RELATED APPLICATIONS

[0001] This application claims priority to U.S. Ser. No. 60/167,383, filed Nov. 24, 1999, which is incorporated herein by reference in its entirety.

### BACKGROUND OF THE INVENTION

[0002] Sequence polymorphism-based analysis of nucleic acid sequences can augment or replace previously known methods for determining the identity and relatedness of individuals. The approach is generally based on alterations in nucleic acid sequences between related individuals. This analysis has been widely used in a variety of genetic, diagnostic, and forensic applications. For example, polymorphism analyses are used in identity and paternity analysis, and in genetic mapping studies.

[0003] One such type of variation is a restriction fragment length polymorphism (RFLP). RFLPS can create or delete a recognition sequence for a restriction endonuclease in one nucleic acid relative to a second nucleic acid. The result of the variation is an alteration in the relative length of restriction enzyme generated DNA fragments in the two nucleic acids.

[0004] Other polymorphisms take the form of short tandem repeats (STR) sequences, which are also referred to as variable numbers of tandem repeat (VNTR) sequences. STR sequences typically that include tandem repeats of 2, 3, or 4 nucleotide sequences that are present in a nucleic acid from one individual but absent from a second, related individual at the corresponding genomic location.

[0005] Other polymorphisms take the form of single nucleotide variations, termed single nucleotide polymorphisms (SNPs), between individuals. A SNP can, in some instances, be referred to as a “cSNP” to denote that the nucleotide sequence containing the SNP originates as a cDNA.

[0006] SNPs can arise in several ways. A single nucleotide polymorphism may arise due to a substitution of one nucleotide for another at the polymorphic site. Substitutions can be transitions or transversions. A transition is the replacement of one purine nucleotide by another purine nucleotide, or one pyrimidine by another pyrimidine. A transversion is the replacement of a purine by a pyrimidine, or the converse.

[0007] Single nucleotide polymorphisms can also arise from a deletion of a nucleotide or an insertion of a nucleotide relative to a reference allele. Thus, the polymorphic site is a site at which one allele bears a gap with respect to a single nucleotide in another allele. Some SNPs occur within, or near genes. One such class includes SNPs falling within regions of genes encoding for a polypeptide product. These SNPs may result in an alteration of the amino acid sequence of the polypeptide product and give rise to the expression of a defective or other variant protein. Such variant products can, in some cases result in a pathological condition, e.g., genetic disease. Examples of genes in which a polymorphism within a coding sequence gives rise to genetic disease include sickle cell anemia and cystic fibrosis. Other SNPs do not result in alteration of the polypeptide product. Of course, SNPs can also occur in noncoding regions of genes.

[0008] SNPs tend to occur with great frequency and are spaced uniformly throughout the genome. The frequency and uniformity of SNPs means that there is a greater probability that such a polymorphism will be found in close proximity to a genetic locus of interest.

### SUMMARY OF THE INVENTION

[0009] The invention is based in part on the discovery of novel single nucleotide polymorphisms (SNPs) in regions of human DNA.

[0010] Accordingly, in one aspect, the invention provides an isolated polynucleotide which includes one or more of the SNPs described herein. The polynucleotide can be, e.g., a nucleotide sequence which includes one or more of the polymorphic sequences shown in Table 1 and the Sequence Listing (SEQ ID NOS: 1-1468) and which includes a polymorphic sequence, or a fragment of the polymorphic sequence, as long as it includes the polymorphic site. The polynucleotide may alternatively contain a nucleotide sequence which includes a sequence complementary to one or more of the sequences (SEQ ID NOS: 1-1468), or a fragment of the complementary nucleotide sequence, provided that the fragment includes a polymorphic site in the polymorphic sequence.

[0011] The polynucleotide can be, e.g., DNA or RNA, and can be between about 10 and about 100 nucleotides, e.g, 10-90, 10-75, 10-51, 10-40, or 10-30, nucleotides in length.

[0012] In some embodiments, the polymorphic site in the polymorphic sequence includes a nucleotide other than the nucleotide listed in Table 1, column 5 for the polymorphic sequence, e.g., the polymorphic site includes the nucleotide listed in Table 1, column 6 for the polymorphic sequence.

[0013] In other embodiments, the complement of the polymorphic site includes a nucleotide other than the complement of the nucleotide listed in Table 1, column 5 for the complement of the polymorphic sequence, e.g., the complement of the nucleotide listed in Table 1, column 6 for the polymorphic sequence.

[0014] In some embodiments, the polymorphic sequence is associated with a polypeptide related to one of the protein families disclosed herein. For example, the nucleic acid may be associated with a polypeptide related to an ATPase associated protein, a cadherin, or any of the other proteins identified in Table 1, column 10.

[0015] In another aspect, the invention provides, an isolated allele-specific oligonucleotide that hybridizes to a first polynucleotide containing a polymorphic site. The first polynucleotide can be, e.g., a nucleotide sequence comprising one or more polymorphic sequences (SEQ ID NOS:1-1468), provided that the polymorphic sequence includes a nucleotide other than the nucleotide recited in Table 1, column 5 for the polymorphic sequence. Alternatively, the first polynucleotide can be a nucleotide sequence that is a fragment of the polymorphic sequence, provided that the fragment includes a polymorphic site in the polymorphic sequence, or a complementary nucleotide sequence which includes a sequence complementary to one or more polymorphic sequences (SEQ ID NOS:1-1468), provided that the complementary nucleotide sequence includes a nucleotide other than the complement of the nucleotide recited in Table 1, column 5. The first polynucleotide may in addition include a nucleotide sequence that is a fragment of the complementary sequence, provided that the fragment includes a polymorphic site in the polymorphic sequence.

[0016] In some embodiments, the oligonucleotide does not hybridize under stringent conditions to a second polynucleotide. The second polynucleotide can be, e.g., (a) a nucleotide sequence comprising one or more polymorphic sequences (SEQ ID NOS: 1-1468), wherein the polymorphic sequence includes the nucleotide listed in Table 1, column 5 for the polymorphic sequence; (b) a nucleotide sequence that is a fragment of any of the polymorphic sequences; (c) a complementary nucleotide sequence including a sequence complementary to one or more polymorphic sequences (SEQ ID NOS: 1-1468), wherein the polymorphic sequence includes the complement of the nucleotide listed in Table 1, column 5; and (d) a nucleotide sequence that is a fragment of the complementary sequence, provided that the fragment includes a polymorphic site in the polymorphic sequence.

[0017] The oligonucleotide can be, e.g., between about 10 and about 100 bases in length. In some embodiments, the oligonucleotide is between about 10 and 75 bases, 10 and 51 bases, 10 and about 40 bases, or about 15 and 30 bases in length.

[0018] The invention also provides a method of detecting a polymorphic site in a nucleic acid. The method includes contacting the nucleic acid with an oligonucleotide that hybridizes to a polymorphic sequence selected from the group consisting of SEQ ID NOS: 1-1468, or its complement, provided that the polymorphic sequence includes a nucleotide other than the nucleotide recited in Table 1, column 5 for the polymorphic sequence, or the complement includes a nucleotide other than the complement of the nucleotide recited in Table 1, column 5. The method also includes determining whether the nucleic acid and the oligonucleotide hybridize. Hybridization of the oligonucleotide to the nucleic acid sequence indicates the presence of the polymorphic site in the nucleic acid.

[0019] In preferred embodiments, the oligonucleotide does not hybridize to the polymorphic sequence when the polymorphic sequence includes the nucleotide recited in Table 1, column 5 for the polymorphic sequence, or when the complement of the polymorphic sequence includes the complement of the nucleotide recited in Table 1, column 5 for the polymorphic sequence.

[0020] The oligonucleotide can be, e.g., between about 10 and about 100 bases in length. In some embodiments, the oligonucleotide is between about 10 and 75 bases, 10 and 51 bases, 10 and about 40 bases, or about 15 and 30 bases in length.

[0021] In some embodiments, the polymorphic sequence identified by the oligonucleotide is associated with a polypeptide related to one of the protein families disclosed herein. For example, the nucleic acid may be associated polypeptide related to an ATPase associated protein, cadherin, or any of the other protein families identified in Table 1, column 10.

[0022] In another aspect, the method includes determining if a sequence polymorphism is the present in a subject, such as a human. The method includes providing a nucleic acid from the subject and contacting the nucleic acid with an oligonucleotide that hybridizes to a polymorphic sequence selected from the group consisting of SEQ ID NOS: 1-1468, or its complement, provided that the polymorphic sequence includes a nucleotide other than the nucleotide recited in Table 1, column 5 for said polymorphic sequence, or the complement includes a nucleotide other than the complement of the nucleotide recited in Table 1, column 5. Hybridization between the nucleic acid and the oligonucleotide is then determined. Hybridization of the oligonucleotide to the nucleic acid sequence indicates the presence of the polymorphism in said subject.

[0023] In a further aspect, the invention provides a method of determining the relatedness of a first and second nucleic acid. The method includes providing a first nucleic acid and a second nucleic acid and contacting the first nucleic acid and the second nucleic acid with an oligonucleotide that hybridizes to a polymorphic sequence selected from the group consisting of SEQ ID NOS: 1-1468, or its complement, provided that the polymorphic sequence includes a nucleotide other than the nucleotide recited in Table 1, column 5 for the polymorphic sequence, or the complement includes a nucleotide other than the complement of the nucleotide recited in Table 1, column 5. The method also includes determining whether the first nucleic acid and the second nucleic acid hybridize to the oligonucleotide, and comparing hybridization of the first and second nucleic acids to the oligonucleotide. Hybridization of first and second nucleic acids to the nucleic acid indicates the first and second subjects are related.

[0024] In preferred embodiments, the oligonucleotide does not hybridize to the polymorphic sequence when the polymorphic sequence includes the nucleotide recited in Table 1, column 5 for the polymorphic sequence, or when the complement of the polymorphic sequence includes the complement of the nucleotide recited in Table 1, column 5 for the polymorphic sequence.

[0025] The oligonucleotide can be, e.g., between about 10 and about 100 bases in length. In some embodiments, the oligonucleotide is between about 10 and 75 bases, 10 and 51 bases, 10 and about 40 bases, or about 15 and 30 bases in length.

[0026] The method can be used in a variety of applications. For example, the first nucleic acid may be isolated from physical evidence gathered at a crime scene, and the second nucleic acid may be obtained from a person suspected of having committed the crime. Matching the two nucleic acids using the method can establish whether the physical evidence originated from the person.

[0027] In another example, the first sample may be from a human male suspected of being the father of a child and the second sample may be from the child. Establishing a match using the described method can establish whether the male is the father of the child.

[0028] In another aspect, the invention provides an isolated polypeptide comprising a polymorphic site at one or more amino acid residues, and wherein the protein is encoded by a polynucleotide including one of the polymorphic sequences SEQ ID NOS:1-1468, or their complement, provided that the polymorphic sequence includes a nucleotide other than the nucleotide recited in Table 1, column 5 for the polymorphic sequence, or the complement includes a nucleotide other than the complement of the nucleotide recited in Table 1, column 5.

[0029] The polypeptide can be, e.g., related to one of the protein families disclosed herein. For example, polypeptide can be related to an ATPase associated protein, cadherin, or any of the other proteins provided in Table 1, column 10.

[0030] In some embodiments, the polypeptide is translated in the same open reading frame as is a wild type protein whose amino acid sequence is identical to the amino acid sequence of the polymorphic protein except at the site of the polymorphism.

[0031] In some embodiments, the polypeptide encoded by the polymorphic sequence, or its complement, includes the nucleotide listed in Table 1, column 6 for the polymorphic sequence, or the complement includes the complement of the nucleotide listed in Table 1, column 6.

[0032] The invention also provides an antibody that binds specifically to a polypeptide encoded by a polynucleotide comprising a nucleotide sequence encoded by a polynucleotide selected from the group consisting of polymorphic sequences SEQ ID NOS:1-1468, or its complement. The polymorphic sequence includes a nucleotide other than the nucleotide recited in Table 1, column 5 for the polymorphic sequence, or the complement includes a nucleotide other than the complement of the nucleotide recited in Table 1, column 5.

[0033] In some embodiments, the antibody binds specifically to a polypeptide encoded by a polymorphic sequence which includes the nucleotide listed in Table 1, column 6 for the polymorphic sequence.

[0034] Preferably, the antibody does not bind specifically to a polypeptide encoded by a polymorphic sequence which includes the nucleotide listed in Table 1, column 5 for the polymorphic sequence.

[0035] The invention further provides a method of detecting the presence of a polypeptide having one or more amino acid residue polymorphisms in a subject. The method includes providing a protein sample from the subject and contacting the sample with the above-described antibody under conditions that allow for the formation of antibody-antigen complexes. The antibody-antigen complexes are then detected. The presence of the complexes indicates the presence of the polypeptide.

[0036] The invention also provides a method of treating a subject suffering from, at risk for, or suspected of, suffering from a pathology ascribed to the presence of a sequence polymorphism in a subject, e.g., a human, non-human primate, cat, dog, rat, mouse, cow, pig, goat, or rabbit. The method includes providing a subject suffering from a pathology associated with aberrant expression of a first nucleic acid comprising a polymorphic sequence selected from the group consisting of SEQ ID NOS:1-1468, or its complement, and treating the subject by administering to the subject an effective dose of a therapeutic agent. Aberrant expression can include qualitative alterations in expression of a gene, e.g., expression of a gene encoding a polypeptide having an altered amino acid sequence with respect to its wild-type counterpart. Qualitatively different polypeptides can include, shorter, longer, or altered polypeptides relative to the amino acid sequence of the wild-type polypeptide. Aberrant expression can also include quantitative alterations in expression of a gene. Examples of quantitative alterations in gene expression include lower or higher levels of expression of the gene relative to its wild-type counterpart, or alterations in the temporal or tissue-specific expression pattern of a gene. Finally, aberrant expression may also include a combination of qualitative and quantitative alterations in gene expression.

[0037] The therapeutic agent can include, e.g., second nucleic acid comprising the polymorphic sequence, provided that the second nucleic acid comprises the nucleotide present in the wild type allele. In some embodiments, the second nucleic acid sequence comprises a polymorphic sequence which includes nucleotide listed in Table 1, column 5 for the polymorphic sequence.

[0038] Alternatively, the therapeutic agent can be a polypeptide encoded by a polynucleotide comprising polymorphic sequence selected from the group consisting of SEQ ID NOS:1-1468, or by a polynucleotide comprising a nucleotide sequence that is complementary to any one of polymorphic sequences SEQ ID NOS:1-1468, provided that the polymorphic sequence includes the nucleotide listed in Table 1, column 6 for the polymorphic sequence.

[0039] The therapeutic agent may further include an antibody as herein described, or an oligonucleotide comprising a polymorphic sequence selected from the group consisting of SEQ ID NOS:1-1468, or by a polynucleotide comprising a nucleotide sequence that is complementary to any one of polymorphic sequences SEQ ID NOS:1-1468, provided that the polymorphic sequence includes the nucleotide listed in Table 1, column 5 or Table 1, column 6 for the polymorphic sequence.

[0040] In another aspect, the invention provides an oligonucleotide array comprising one or more oligonucleotides hybridizing to a first polynucleotide at a polymorphic site encompassed therein. The first polynucleotide can be, e.g., a nucleotide sequence comprising one or more polymorphic sequences (SEQ ID NOS:1-1468); a nucleotide sequence that is a fragment of any of the nucleotide sequences, provided that the fragment includes a polymorphic site in the polymorphic sequence; a complementary nucleotide sequence comprising a sequence complementary to one or more polymorphic sequences (SEQ ID NOS:1-1468); or a nucleotide sequence that is a fragment of the complementary sequence, provided that the fragment includes a polymorphic site in the polymorphic sequence.

[0041] In preferred embodiments, the array comprises 10; 100; 1,000; 10,000; 100,000 or more oligonucleotides.

[0042] The invention also provides a kit comprising one or more of the herein-described nucleic acids. The kit can include, e.g., a polynucleotide which includes one or more of the SNPs described herein. The polynucleotide can be, e.g., a nucleotide sequence which includes one or more of the polymorphic sequences shown in Table 1 and the Sequence Listing (SEQ ID NOS: 1-1468) and which includes a polymorphic sequence, or a fragment of the polymorphic sequence, as long as it includes the polymorphic site. The polynucleotide may alternatively contain a nucleotide sequence which includes a sequence complementary to one or more of the sequences (SEQ ID NOS:1-1468), or a fragment of the complementary nucleotide sequence, provided that the fragment includes a polymorphic site in the polymorphic sequence. The invention provides an isolated allele-specific oligonucleotide that hybridizes to a first polynucleotide containing a polymorphic site. The first polynucleotide can be, e.g., a nucleotide sequence comprising one or more polymorphic sequences (SEQ ID NOS:1-1468), provided that the polymorphic sequence includes a nucleotide other than the nucleotide recited in Table 1, column 5 for the polymorphic sequence. Alternatively, the first polynucleotide can be a nucleotide sequence that is a fragment of the polymorphic sequence, provided that the fragment includes a polymorphic site in the polymorphic sequence, or a complementary nucleotide sequence which includes a sequence complementary to one or more polymorphic sequences (SEQ ID NOS:1-1468), provided that the complementary nucleotide sequence includes a nucleotide other than the complement of the nucleotide recited in Table 1, column 5. The first polynucleotide may in addition include a nucleotide sequence that is a fragment of the complementary sequence, provided that the fragment includes a polymorphic site in the polymorphic sequence.

[0043] Unless otherwise defined, all technical and scientific terms used herein have the same meaning as commonly understood by one of ordinary skill in the art to which this invention belongs. Although methods and materials similar or equivalent to those described herein can be used in the practice or testing of the present invention, suitable methods and materials are described below. All publications, patent applications, patents, and other references mentioned herein are incorporated by reference in their entirety. In the case of conflict, the present specification, including definitions, will control. In addition, the materials, methods, and examples are illustrative only and not intended to be limiting.

[0044] Other features and advantages of the invention will be apparent from the following detailed description and claims.

### DETAILED DESCRIPTION OF THE INVENTION

[0045] The invention provides human SNPs in sequences which are transcribed, i.e., are cSNPs. As is explained in more detail below, many SNPs have been identified in genes related to polypeptides of known function. For some applications, SNPs associated with various polypeptides can be used together. For example, SNPs can be group according to whether they are derived from a nucleic acid encoding a polypeptide related to a particular protein family or involved in a particular function. Thus, SNPs related to ATPase associated protein may be collected for some applications, as may SNPs associated with cadherin, or ephrin (EPH), or any of the other proteins recited in Table 1, column 10. Similarly, SNPs can be grouped according to the functions played by their gene products. Such functions include, e.g., structural proteins, proteins from which associated with metabolic pathways fatty acid metabolism, glycolysis, intermediary metabolism, calcium metabolism, proteases, and amino acid metabolism.

[0046] The SNPs are shown in Table 1 and the Sequence Listing. Both provide a summary of the polymorphic sequences disclosed herein. In the Table, a “SNP” is a polymorphic site embedded in a polymorphic sequence. The polymorphic site is occupied by a single nucleotide, which is the position of nucleotide variation between the wild type and polymorphic allelic sequences. The site is usually preceded by and followed by relatively highly conserved sequences of the allele (e.g., sequences that vary in less than 1/100 or 1/1000 members of the populations). Thus, a polymorphic sequence can include one or more of the following sequences: (1) a sequence having the nucleotide denoted in Table 1, column 5 at the polymorphic site in the polymorphic sequence; or (2) a sequence having a nucleotide other than the nucleotide denoted in Table 1, column 5 at the polymorphic site in the polymorphic sequence. An example of the latter sequence is a polymorphic sequence having the nucleotide denoted in Table 1, column 6 at the polymorphic site in the polymorphic sequence.

[0047] Nucleotide sequences for a referenced-polymorphic pair are presented in Table 1. Each cSNP entry provides information concerning the wild type nucleotide sequence as well as the corresponding sequence that includes the SNP at the polymorphic site. Since the wild type sequence is already known, the Sequence Listing accompanying this application provides only the sequence of the polymorphic allele; its SEQ ID NO: is also cross referenced in the Table 1. A reference to the SEQ ID NO: giving the translated amino acid sequence is also given if appropriate. The Table includes thirteen columns that provide descriptive information for each cSNP, each of which occupies one row in the Table. The column headings, and an explanation for each, are given below.

[0048] “SEQ ID” provides the cross-reference to the nucleotide SEQ ID NO:, and, as explained below, an amino acid SEQ ID NO: as well, in the Sequence Listing of the application. Conversely, each sequence entry in the Sequence Listing also includes a cross-reference to the CuraGen sequence ID, under the label “CuraGen Sequence ID”. The first SEQ ID NO: given in the first column of each row of the Table is the SEQ ID NO: identifying the nucleic acid sequence for the polymorphism. If a polymorphism carries an entry for the amino acid portion of the row, a second SEQ ID NO: appears in parentheses in the column “Amino acid after” (see below). This second SEQ ID NO: refers to an amino acid sequence giving the polymorphic amino acid sequence that is the translation of the nucleotide polymorphism. If a polymorphism carries no entry for the protein portion of the row, only one SEQ ID NO: is provided.

[0049] “CuraGen sequence ID” provides CuraGen Corporation's accession number.

[0050] “Base pos. of SNP” gives the numerical position of the nucleotide in the reference, or wild-type, gene at which the cSNP is found. This enumeration of bases is that found in the public database from which the reference gene is taken (see column headed “Name of protein identified following a BLASTX analysis of the CuraGen sequence”) as of the filing date of the instant application.

[0051] “Polymorphic sequence” provides a 51-base sequence with the polymorphic site at the 26^{th} base in the sequence, as well as 25 bases from the reference sequence on the 5′ side and the 3′ side of the polymorphic site. The designation at the polymorphic site is enclosed in square brackets, and provides first, the reference nucleotide; second, a “slash (/)”; and third, the polymorphic nucleotide. In certain cases the polymorphism is an insertion or a deletion. In that case, the position which is “unfilled” (i.e., the reference or the polymorphic position) is indicated by the word “gap”.

[0052] “Base before” provides the nucleotide present in the reference, or wild-type, gene at the position at which the polymorphism is found.

[0053] “Base after” provides the altered nucleotide at the position of the polymorphism.

[0054] “Amino acid before” provides the amino acid in the reference protein, if the polymorphism occurs in a coding region.

[0055] “Amino acid after” provides the amino acid in the polymorphic protein, if the polymorphism occurs in a coding region. This column also includes the SEQ ID NO: in parentheses if the polymorphism occurs in a coding region.

[0056] “Type of change” provides information on the nature of the polymorphism.

[0057] “SILENT-NONCODING” is used if the polymorphism occurs in a noncoding region of a nucleic acid.

[0058] “SILENT-CODING” is used if the polymorphism occurs in a coding region of a nucleic acid of a nucleic acid and results in no change of amino acid in the translated polymorphic protein.

[0059] “CONSERVATIVE” is used if the polymorphism occurs in a coding region of a nucleic acid and provides a change in which the altered amino acid falls in the same class as the reference amino acid. The classes are:

[0060] Aliphatic: Gly, Ala, Val, Leu, Ile;

[0061] Aromatic: Phe, Tyr, Trp;

[0062] Sulfur-containing: Cys, Met;

[0063] Aliphatic OH: Ser, Thr;

[0064] Basic: Lys, Arg, His;

[0065] Acidic: Asp, Glu, Asn, Gln;

[0066] Pro falls in none of the other classes; and

[0067] End defines a termination codon.

[0068] “NONCONSERVATIVE” is used if the polymorphism occurs in a coding region of a nucleic acid and provides a change in which the altered amino acid falls in a different class than the reference amino acid.

[0069] “FRAMESHIFT” relates to an insertion or a deletion. If the frameshift occurs in a coding region, the Table provides the translation of the frameshifted codons 3′ to the polymorphic site.

[0070] “Protein classification of CuraGen gene” provides a generic class into which the protein is classified. During the course of the work leading to the filing of this application, several classes of proteins were identified. Some are described further below.

[0071] “Name of protein identified following a BLASTX analysis of the CuraGen sequence” provides the database reference for the protein found to resemble the novel reference-polymorphism cognate pair most closely.

[0072] “Similarity (pvalue) following a BLASTX analysis” provides the pvalue, a statistical measure from the BLASTX analysis that the polymorphic sequence is similar to, and therefore an allele of, the reference, or wild-type, sequence. In the present application, a cutoff of pvalue>1×10⁻⁵⁰ (entered, for example, as 1.0E-50 in the Table) is used to establish that the reference-polymorphic cognate pairs are novel. A pvalue<1×10⁻⁵⁰ defines proteins considered to be already known.

[0073] “Map location” provides any information available at the time of filing related to localization of a gene on a chromosome.

[0074] The polymorphisms are arranged in the Table in the following order.

[0075] SEQ ID NOs: 1-722 are SNPs that are silent.

[0076] SEQ ID NOs: 723-797 are SNPs that lead to conservative amino acid changes.

[0077] SEQ ID NOs: 798-989 are SNPs that lead to nonconservative amino acid changes.

[0078] SEQ ID NOs: 990-1095 are SNPs that involve a gap. With respect to the reference or wild-type sequence at the position of the polymorphism, the allelic cSNP introduces an additional nucleotide (an insertion) or deletes a nucleotide (a deletion). An SNP that involves a gap generates a frame shift.

[0079] SEQ ID NOs: 1096-1170 are the amino acid sequences centered at the polymorphic amino acid residue for the protein products provided by SNPs that lead to conservative amino acid changes. These amino acid SEQ ID NOs: are derived from the corresponding nucleotide SEQ ID NOs: 723-797. 7 or 8 amino acids on either side of the polymorphic site are shown. The order in which these sequences appear mirrors the order of presentation of the cognate nucleotide sequences, and is set forth in the Table.

[0080] SEQ ID NOs: 1171-1362 are the amino acid sequences centered at the polymorphic amino acid residue for the protein products provided by SNPs that lead to nonconservative amino acid changes. These amino acid SEQ ID NOs: are derived from the corresponding nucleotide SEQ ID NOs: 798-989. 7 or 8 amino acids on either side of the polymorphic site are shown. The order in which these sequences appear mirrors the order of presentation of the cognate nucleotide sequences, and is set forth in the Table.

[0081] SEQ ID NOs: 1363-1468 are the amino acid sequences centered at the polymorphic amino acid residue for the protein products provided by SNPs that lead to frameshift-induced amino acid changes. These amino acid SEQ ID NOs: are derived from the corresponding nucleotide SEQ ID NOs: 990-1095. 7 or 8 amino acids on either side of the polymorphic site are shown. The order in which these sequences appear mirrors the order of presentation of the cognate nucleotide sequences, and is set forth in the Table.

[0082] Provided herein are compositions which include, or are capable of detecting, nucleic acid sequences having these polymorphisms, as well as methods of using nucleic acids.

### Identification of Individuals Carrying SNPS

[0083] Individuals carrying polymorphic alleles of the invention may be detected at either the DNA, the RNA, or the protein level using a variety of techniques that are well known in the art. Strategies for identification and detection are described in e.g., EP 730,663, EP 717,113, and PCT US97/02102. The present methods usually employ pre-characterized polymorphisms. That is, the genotyping location and nature of polymorphic forms present at a site have already been determined. The availability of this information allows sets of probes to be designed for specific identification of the known polymorphic forms.

[0084] Many of the methods described below require amplification of DNA from target samples. This can be accomplished by e.g., PCR. See generally PCR Technology: Principles and Applications for DNA Amplification (ed. H. A. Erlich, Freeman Press, NY, N.Y., 1992); PCR Protocols: A Guide to Methods and Applications (eds. Innis, et al., Academic Press, San Diego, Calif., 1990); Mattila et al., Nucleic Acids Res. 19, 4967 (1991); Eckert et al., PCR Methods and Applications 1, 17 (1991); PCR (eds. McPherson et al., IRL Press, Oxford); and U.S. Pat. No. 4,683,202.

[0085] The phrase “recombinant protein” or “recombinantly produced protein” refers to a peptide or protein produced using non-native cells that do not have an endogenous copy of DNA able to express the protein. In particular, as used herein, a recombinantly produced protein relates to the gene product of a polymorphic allele, i.e., a “polymorphic protein” containing an altered amino acid at the site of translation of the nucleotide polymorphism. The cells produce the protein because they have been genetically altered by the introduction of the appropriate nucleic acid sequence. The recombinant protein will not be found in association with proteins and other subcellular components normally associated with the cells producing the protein. The terms “protein” and “polypeptide” are used interchangeably herein.

[0086] The phrase “substantially purified” or “isolated” when referring to a nucleic acid, peptide or protein, means that the chemical composition is in a milieu containing fewer, or preferably, essentially none, of other cellular components with which it is naturally associated. Thus, the phrase “isolated” or “substantially pure” refers to nucleic acid preparations that lack at least one protein or nucleic acid normally associated with the nucleic acid in a host cell. It is preferably in a homogeneous state although it can be in either a dry or aqueous solution. Purity and homogeneity are typically determined using analytical chemistry techniques such as gel electrophoresis or high performance liquid chromatography. Generally, a substantially purified or isolated nucleic acid or protein will comprise more than 80% of all macromolecular species present in the preparation. Preferably, the nucleic acid or protein is purified to represent greater than 90% of all macromolecular species present. More preferably the nucleic acid or protein is purified to greater than 95%, and most preferably the nucleic acid or protein is purified to essential homogeneity, wherein other macromolecular species are not detected by conventional analytical procedures.

[0087] The genomic DNA used for the diagnosis may be obtained from any nucleated cells of the body, such as those present in peripheral blood, urine, saliva, buccal samples, surgical specimen, and autopsy specimens. The DNA may be used directly or may be amplified enzymatically in vitro through use of PCR (Saiki et al. Science 239:487-491 (1988)) or other in vitro amplification methods such as the ligase chain reaction (LCR) (Wu and Wallace Genomics 4:560-569 (1989)), strand displacement amplification (SDA) (Walker et al. Proc. Natl. Acad. Sci. U.S.A, 89:392-396 (1992)), self-sustained sequence replication (3SR) (Fahy et al. PCR Methods P&J& 1:25-33 (1992)), prior to mutation analysis.

[0088] The method for preparing nucleic acids in a form that is suitable for mutation detection is well known in the art. A “nucleic acid” is a deoxyribonucleotide or ribonucleotide polymer in either single-or double-stranded form, including known analogs of natural nucleotides unless otherwise indicated. The term “nucleic acids”, as used herein, refers to either DNA or RNA. “Nucleic acid sequence” or “polynucleotide sequence” refers to a single-stranded sequence of deoxyribonucleotide or ribonucleotide bases read from the 5′ end to the 3′ end. The direction of 5′ to 3′ addition of nascent RNA transcripts is referred to as the transcription direction; sequence regions on the DNA strand having the same sequence as the RNA and which are beyond the 5′ end of the RNA transcript in the 5′ direction are referred to as “upstream sequences”; sequence regions on the DNA strand having the same sequence as the RNA and which are beyond the 3′ end of the RNA transcript in the 3′ direction are referred to as “downstream sequences”. The term includes both self-replicating plasmids, infectious polymers of DNA or RNA and nonfunctional DNA or RNA. The complement of any nucleic acid sequence of the invention is understood to be included in the definition of that sequence. “Nucleic acid probes” may be DNA or RNA fragments.

[0089] The detection of polymorphisms in specific DNA sequences, can be accomplished by a variety of methods including, but not limited to, restriction-fragment-length-polymorphism detection based on allele-specific restriction-endonuclease cleavage (Kan and Dozy Lancet ii:910-912 (1978)), hybridization with allele-specific oligonucleotide probes (Wallace et al. Nucl. Acids Res. 6:3543-3557 (1978)), including immobilized oligonucleotides (Saiki et al. Proc. Natl. Acad. SCI. USA, 86:6230-6234 (1969)) or oligonucleotide arrays (Maskos and Southern Nucl. Acids Res 21:2269-2270 (1993)), allele-specific PCR (Newton et al. Nucl Acids Res 17:2503-2516 (1989)), mismatch-repair detection (MRD) (Faham and Cox Genome Res 5:474-482 (1995)), binding of MutS protein (Wagner et al. Nucl Acids Res 23:3944-3948 (1995), denaturing-gradient gel electrophoresis (DGGE) (Fisher and Lerman et al. Proc. Natl. Acad. Sci. U.S.A. 80:1579-1583 (1983)), single-strand-conformation-polymorphism detection (Orita et al. Genomics 5:874-879 (1983)), RNAase cleavage at mismatched base-pairs (Myers et al. Science 230:1242 (1985)), chemical (Cotton et al. Proc. Natl. w Sci. U.S.A, 8Z4397-4401 (1988)) or enzymatic (Youil et al. Proc. Natl. Acad. Sci. U.S.A. 92:87-91 (1995)) cleavage of heteroduplex DNA, methods based on allele specific primer extension (Syvanen et al. Genomics 8:684-692 (1990)), genetic bit analysis (GBA) (Nikiforov et al. &&I Acids 22:41674175 (1994)), the oligonucleotide-ligation assay (OLA) (Landegren et al. Science_{—}241:1077 (1988)), the allele-specific ligation chain reaction (LCR) (Barrany Proc. Natl. Acad. Sci. U.S.A. 88:189-193 (1991)), gap-LCR (Abravaya et al. Nucl Acids Res 23:675-682 (1995)), radioactive and/or fluorescent DNA sequencing using standard procedures well known in the art, and peptide nucleic acid (PNA) assays (Orum et al., Nucl. Acids Res, 21:5332-5356 (1993); Thiede et al., Nucl. Acids Res. 24:983-984 (1996)).

[0090] “Specific hybridization” or “selective hybridization” refers to the binding, or duplexing, of a nucleic acid molecule only to a second particular nucleotide sequence to which the nucleic acid is complementary, under suitably stringent conditions when that sequence is present in a complex mixture (e.g., total cellular DNA or RNA). “Stringent conditions” are conditions under which a probe will hybridize to its target subsequence, but to no other sequences. Stringent conditions are sequence-dependent and are different in different circumstances. Longer sequences hybridize specifically at higher temperatures than shorter ones. Generally, stringent conditions are selected such that the temperature is about 5° C. lower than the thermal melting point (Tm) for the specific sequence to which hybridization is intended to occur at a defined ionic strength and pH. The Tm is the temperature (under defined ionic strength, pH, and nucleic acid concentration) at which 50% of the target sequence hybridizes to the complementary probe at equilibrium. Typically, stringent conditions include a salt concentration of at least about 0.01 to about 1.0 M Na ion concentration (or other salts), at pH 7.0 to 8.3. The temperature is at least about 30° C. for short probes (e.g., 10 to 50 nucleotides). Stringent conditions can also be achieved with the addition of destabilizing agents such as formamide. For example, conditions of 5× SSPE (750 mM NaCl, 50 mM NaPhosphate, 5 mM EDTA, pH 7.4) and a temperature of 25-30° C. are suitable for allele-specific probe hybridization.

[0091] “Complementary” or “target” nucleic acid sequences refer to those nucleic acid sequences which selectively hybridize to a nucleic acid probe. Proper annealing conditions depend, for example, upon a probe's length, base composition, and the number of mismatches and their position on the probe, and must often be determined empirically. For discussions of nucleic acid probe design and annealing conditions, see, for example, Sambrook et al., or Current Protocols in Molecular Biology, F. Ausubel et al., ed., Greene Publishing and Wiley-Interscience, New York (1987).

[0092] A perfectly matched probe has a sequence perfectly complementary to a particular target sequence. The test probe is typically perfectly complementary to a portion of the target sequence. A “polymorphic” marker or site is the locus at which a sequence difference occurs with respect to a reference sequence. Polymorphic markers include restriction fragment length polymorphisms; variable number of tandem repeats (VNTR's), hypervariable regions, minisatellites, dinucleotide repeats, trinucleotide repeats, tetranucleotide repeats, simple sequence repeats, and insertion elements such as Alu. The reference allelic form may be, for example, the most abundant form in a population, or the first allelic form to be identified, and other allelic forms are designated as alternative, variant or polymorrphic alleles. The allelic form occurring most frequently in a selected population is sometimes referred to as the “wild type” form, and herein may also be referred to as the “reference” form. Diploid organisms may be homozygous or heterozygous for allelic forms. A diallelic polymorphism has two distinguishable forms (i.e., base sequences), and a triallelic polymorphism has three such forms.

[0093] As used herein an “oligonucleotide” is a single-stranded nucleic acid ranging in length from 2 to about 60 bases. Oligonucleotides are often synthetic but can also be produced from naturally occurring polynucleotides. A probe is an oligonucleotide capable of binding to a target nucleic acid of a complementary sequence through one or more types of chemical bonds, usually through complementary base pairing via hydrogen bond formation. Oligonucleotides probes are often between 5 and 60 bases, and, in specific embodiments, may be between 10-40, or 15-30 bases long. An oligonucleotide probe may include natural (i.e. A, G, C, or T) or modified bases (7-deazaguanosine, inosine, etc.). In addition, the bases in an oligonucleotide probe may be joined by a linkage other than a phosphodiester bond, such as a phosphoramidite linkage or a phosphorothioate linkage, or they may be peptide nucleic acids in which the constituent bases are joined by peptide bonds rather than by phosphodiester bonds, so long as it does not interfere with hybridization.

[0094] As used herein, the term “primer” refers to a single-stranded oligonucleotide which acts as a point of initiation of template-directed DNA synthesis under appropriate conditions (e.g., in the presence of four different nucleoside triphosphates and a polymerization agent, such as DNA polymerase, RNA polymerase or reverse transcriptase) in an appropriate buffer and at a suitable temperature. The appropriate length of a primer depends on the intended use of the primer, but typically ranges from 15 to 30 nucleotides. Short primer molecules generally require cooler temperatures to form sufficiently stable hybrid complexes with the template. A primer need not be perfectly complementary to the exact sequence of the template, but should be sufficiently complementary to hybridize with it. The term “primer site” refers to the sequence of the target DNA to which a primer hybridizes. The term “primer pair” refers to a set of primers including a 5′ (upstream) primer that hybridizes with the 5′ end of the DNA sequence to be amplified and a 3′ (downstream) primer that hybridizes with the complement of the 3′ end of the sequence to be amplified.

[0095] DNA fragments can be prepared, for example, by digesting plasmid DNA, or by use of PCR. Oligonucleotides for use as primers or probes are chemically synthesized by methods known in the field of the chemical synthesis of polynucleotides, including by way of non-limiting example the phosphoramidite method described by Beaucage and Carruthers, Tetrahedron Lett 22:1859-1 862 (1981) and the triester method provided by Matteucci, et al., J. Am. Chem. Soc., 103:3185 (1981) both incorporated herein by reference. These syntheses may employ an automated synthesizer, as described in Needham-VanDevanter, D. R., et al., Nucleic Acids Res. 12:61596168 (1984). Purification of oligonucleotides may be carried out by either native acrylamide gel electrophoresis or by anion-exchange HPLC as described in Pearson, J. D. and Regnier, F. E., J. Chrom, 255:137-149 (1983). A double stranded fragment may then be obtained, if desired, by annealing appropriate complementary single strands together under suitable conditions or by synthesizing the complementary strand using a DNA polymerase with an appropriate primer sequence. Where a specific sequence for a nucleic acid probe is given, it is understood that the complementary strand is also identified and included. The complementary strand will work equally well in situations where the target is a double-stranded nucleic acid.

[0096] The sequence of the synthetic oligonucleotide or of any nucleic acid fragment can be can be obtained using either the dideoxy chain termination method or the Maxam-Gilbert method (see Sambrook et al. Molecular Cloning—a Laboratory Manual (2nd Ed.), Vols. 1-3, Cold Spring Harbor Laboratory, Cold Spring Harbor, N.Y., (1989), which is incorporated herein by reference. This manual is hereinafter referred to as “Sambrook et al.”; Zyskind et al., (1988)). Recombinant DNA Laboratory Manual, (Acad. Press, New York). Oligonucleotides useful in diagnostic assays are typically at least 8 consecutive nucleotides in length, and may range upwards of 18 nucleotides in length to greater than 100 or more consecutive nucleotides.

[0097] Another aspect of the invention pertains to isolated antisense nucleic acid molecules that are hybridizable to or complementary to the nucleic acid molecule comprising the SNP-containing nucleotide sequences of the invention, or fragments, analogs or derivatives thereof. An “antisense” nucleic acid comprises a nucleotide sequence that is complementary to a “sense” nucleic acid encoding a protein, e.g., complementary to the coding strand of a double-stranded cDNA molecule or complementary to an mRNA sequence. In specific aspects, antisense nucleic acid molecules are provided that comprise a sequence complementary to at least about 10, about 25, about 50, or about 60 nucleotides or an entire SNP coding strand, or to only a portion thereof.

[0098] In one embodiment, an antisense nucleic acid molecule is antisense to a “coding region” of the coding strand of a polymorphic nucleotide sequence of the invention. The term “coding region” refers to the region of the nucleotide sequence comprising codons which are translated into amino acid. In another embodiment, the antisense nucleic acid molecule is antisense to a “noncoding region” of the coding strand of a nucleotide sequence of the invention. The term “noncoding region” refers to 5′ and 3′ sequences which flank the coding region that are not translated into amino acids (i.e., also referred to as 5′ and 3′ untranslated regions).

[0099] Given the coding strand sequences disclosed herein, antisense nucleic acids of the invention can be designed according to the rules of Watson and Crick or Hoogsteen base pairing. For example, the antisense nucleic acid molecule can generally be complementary to the entire coding region of an mRNA, but more preferably as embodied herein, it is an oligonucleotide that is antisense to only a portion of the coding or noncoding region of the mRNA. An antisense oligonucleotide can range in length between about 5 and about 60 nucleotides, preferably between about 10 and about 45 nucleotides, more preferably between about 15 and 40 nucleotides, and still more preferably between about 15 and 30 in length. An antisense nucleic acid of the invention can be constructed using chemical synthesis or enzymatic ligation reactions using procedures known in the art. For example, an antisense nucleic acid (e.g., an antisense oligonucleotide) can be chemically synthesized using naturally occurring nucleotides or variously modified nucleotides designed to increase the biological stability of the molecules or to increase the physical stability of the duplex formed between the antisense and sense nucleic acids, e.g., phosphorothioate derivatives and acridine substituted nucleotides can be used.

[0100] Examples of modified nucleotides that can be used to generate the antisense nucleic acid include: 5-fluorouracil, 5-bromouracil, 5-chlorouracil, 5-iodouracil, hypoxanthine, xanthine, 4-acetylcytosine, 5-(carboxyhydroxylmethyl) uracil, 5-carboxymethylaminomethyl-2-thiouridine, 5-carboxymethylaminomethyluracil, dihydrouracil, beta-D-galactosylqueosine, inosine, N6-isopentenyladenine, 1-methylguanine, 1-methylinosine, 2,2-dimethylguanine, 2-methyladenine, 2-methylguanine, 3-methylcytosine, 5-methylcytosine, N6-adenine, 7-methylguanine, 5-methylaminomethyluracil, 5-methoxyaminomethyl-2-thiouracil, beta-D-mannosylqueosine, 5′-methoxycarboxymethyluracil, 5-methoxyuracil, 2-methylthio-N-6-isopentenyladenine, uracil-5-oxyacetic acid (v), wybutoxosine, pseudouracil, queosine, 2-thiocytosine, 5-methyl-2-thiouracil, 2-thiouracil, 4-thiouracil, 5-methyluracil, uracil-5-oxyacetic acid methylester, uracil-5-oxyacetic acid (v), 5-methyl-2-thiouracil, 3-(3-amino-3-N-2-carboxypropyl) uracil, (acp3)w, and 2,6-diaminopurine. Alternatively, the antisense nucleic acid can be produced biologically using an expression vector into which a nucleic acid has been subcloned in an antisense orientation (i.e., RNA transcribed from the inserted nucleic acid will be of an antisense orientation to a target nucleic acid of interest, described further in the following section).

[0101] The antisense nucleic acid molecules of the invention are typically administered to a subject or generated in situ such that they hybridize with or bind to cellular mRNA and/or genomic DNA encoding a polymorphic protein to thereby inhibit expression of the protein, e.g., by inhibiting transcription and/or translation. The hybridization can be by conventional nucleotide complementary to form a stable duplex, or, for example, in the case of an antisense nucleic acid molecule that binds to DNA duplexes, through specific interactions in the major groove of the double helix. An example of a route of administration of antisense nucleic acid molecules of the invention includes direct injection at a tissue site. Alternatively, antisense nucleic acid molecules can be modified to target selected cells and then administered systemically. For example, for systemic administration, antisense molecules can be modified such that they specifically bind to receptors or antigens expressed on a selected cell surface, e.g., by linking the antisense nucleic acid molecules to peptides or antibodies that bind to cell surface receptors or antigens. The antisense nucleic acid molecules can also be delivered to cells using the vectors described herein. To achieve sufficient intracellular concentrations of antisense molecules, vector constructs in which the antisense nucleic acid molecule is placed under the control of a strong pol II or pol III promoter are preferred.

[0102] In yet another embodiment, the antisense nucleic acid molecule of the invention is an α-anomeric nucleic acid molecule. An α-anomeric nucleic acid molecule forms specific double-stranded hybrids with complementary RNA in which, contrary to the usual β-units, the strands run parallel to each other (Gaultier et al. (1987) Nucleic Acids Res 15: 6625-6641). The antisense nucleic acid molecule can also comprise a 2′-o-methylribonucleotide (Inoue et al. (1987) Nucleic Acids Res 15: 6131-6148) or a chimeric RNA-DNA analogue (Inoue et al. (1987) FEBS Lett 215: 327-330).

[0103] The following terms are used to describe the sequence relationships between two or more nucleic acids or polynucleotides: “reference sequence”, “comparison window”, “sequence identity”, “percentage of sequence identity”, and “substantial identity”. A “reference sequence” is a defined sequence used as a basis for a sequence comparison; a reference sequence may be a subset of a larger sequence, for example, as a segment of a full-length cDNA or gene sequence given in a sequence listing, or may comprise a complete cDNA or gene sequence. Optimal alignment of sequences for aligning a comparison window may, for example, be conducted by the local homology algorithm of Smith and Waterman Adv. Appl. Math, 2482 (1981), by the homology alignment algorithm of Needleman and Wunsch J. Mol. Biol. 48:443 (1970), by the search for similarity method of Pearson and Lipman Proc. Natl. Acad. Sci. U.S.A. 852444 (1988), or by computerized implementations of these algorithms (for example, GAP, BESTFIT, FASTA, and TFASTA in the Wisconsin Genetics Software Package Release 7.0, Genetics Computer Group, 575 Science Dr., Madison, Wis.).

[0104] Techniques for nucleic acid manipulation of the nucleic acid sequences harboring the cSNP's of the invention, such as subcloning nucleic acid sequences encoding polypeptides into expression vectors, labeling probes, DNA hybridization, and the like, are described generally in Sambrook et al., The phrase “nucleic acid sequence encoding” refers to a nucleic acid which directs the expression of a specific protein, peptide or amino acid sequence. The nucleic acid sequences include both the DNA strand sequence that is transcribed into RNA and the RNA sequence that is translated into protein, peptide or amino acid sequence. The nucleic acid sequences include both the full length nucleic acid sequences disclosed herein as well as non-full length sequences derived from the full length protein. It being further understood that the sequence includes the degenerate codons of the native sequence or sequences which may be introduced to provide codon preference in a specific host cell. Consequently, the principles of probe selection and array design can readily be extended to analyze more complex polymorphisms (see EP 730,663). For example, to characterize a triallelic SNP polymorphism, three groups of probes can be designed tiled on the three polymorphic forms as described above. As a further example, to analyze a diallelic polymorphism involving a deletion of a nucleotide, one can tile a first group of probes based on the undeleted polymorphic form as the reference sequence and a second group of probes based on the deleted form as the reference sequence.

[0105] For assay of genomic DNA, virtually any biological convenient tissue sample can be used. Suitable samples include whole blood, semen, saliva, tears, urine, fecal material, sweat, buccal, skin and hair can be used. Genomic DNA is typically amplified before analysis. Amplification is usually effected by PCR using primers flanking a suitable fragment e.g., of 50-500 nucleotides containing the locus of the polymorphism to be analyzed. Target is usually labeled in the course of amplification. The amplification product can be RNA or DNA, single stranded or double stranded. If double stranded, the amplification product is typically denatured before application to an array. If genomic DNA is analyzed without amplification, it may be desirable to remove RNA from the sample before applying it to the array. Such can be accomplished by digestion with DNase-free RNase.

[0106] Detection of Polymorphisms in a Nucleic Acid Sample

[0107] The SNPs disclosed herein can be used to determine which forms of a characterized polymorphism are present in individuals under analysis.

[0108] The design and use of allele-specific probes for analyzing polymorphisms is described by e.g., Saiki et al., Nature 324, 163-166 (1986); Dattagupta, EP 235,726, Saiki, WO 89/11548. Allele-specific probes can be designed that hybridize to a segment of target DNA from one individual but do not hybridize to the corresponding segment from another individual due to the presence of different polymorphic forms in the respective segments from the two individuals. Hybridization conditions should be sufficiently stringent that there is a significant difference in hybridization intensity between alleles, and preferably an essentially binary response, whereby a probe hybridizes to only one of the alleles. Some probes are designed to hybridize to a segment of target DNA such that the polymorphic site aligns with a central position (e.g., in a 15-mer at the 7 position; in a 16-mer, at either the 7, 8 or 9 position) of the probe. This design of probe achieves good discrimination in hybridization between different allelic forms.

[0109] Allele-specific probes are often used in pairs, one member of a pair showing a perfect match to a reference form of a target sequence and the other member showing a perfect match to a variant form. Several pairs of probes can then be immobilized on the same support for simultaneous analysis of multiple polymorphisms within the same target sequence.

[0110] The polymorphisms can also be identified by hybridization to nucleic acid arrays, some examples of which are described in published PCT application WO 95/11995. WO 95/11995 also describes subarrays that are optimized for detection of a variant form of a precharacterized polymorphism. Such a subarray contains probes designed to be complementary to a second reference sequence, which is an allelic variant of the first reference sequence. The second group of probes is designed by the same principles, except that the probes exhibit complementarity to the second reference sequence. The inclusion of a second group (or further groups) can be particularly useful for analyzing short subsequences of the primary reference sequence in which multiple mutations are expected to occur within a short distance commensurate with the length of the probes (e.g., two or more mutations within 9 to 21 bases).

[0111] An allele-specific primer hybridizes to a site on a target DNA overlapping a polymorphism and only primes amplification of an allelic form to which the primer exhibits perfect complementarity. See Gibbs, Nucleic Acid Res. 17 2427-2448 (1989). This primer is used in conjunction with a second primer which hybridizes at a distal site. Amplification proceeds from the two-primers, resulting in a detectable product which indicates the particular allelic form is present. A control is usually performed with a second pair of primers, one of which shows a single base mismatch at the polymorphic site and the other of which exhibits perfect complementarity to a distal site. The single-base mismatch prevents amplification and no detectable product is formed. The method works best when the mismatch is included in the 3′-most position of the oligonucleotide aligned with the polymorphism because this position is most destabilizing to elongation from the primer (see, e.g., WO 93/22456).

[0112] Amplification products generated using the polymerase chain reaction can be analyzed by the use of denaturing gradient gel electrophoresis. Different alleles can be identified based on the different sequence-dependent melting properties and electrophoretic migration of DNA in solution. Erlich, ed., PCR Technology, Principles and Applications for DNA Amplification, (W. H. Freeman and Co New York, 1992, Chapter 7).

[0113] Alleles of target sequences can be differentiated using single-strand conformation polymorphism analysis, which identifies base differences by alteration in electrophoretic migration of single stranded PCR products, as described in Orita et al., Proc. Nat. Acad. Sci. 86, 2766-2770 (1989). Amplified PCR products can be generated and heated or otherwise denatured, to form single stranded amplification products. Single-stranded nucleic acids may refold or form secondary structures which are partially dependent on the base sequence. The different electrophoretic mobilities of single-stranded amplification products can be related to base-sequence differences between alleles of target sequences.

[0114] The genotype of an individual with respect to a pathology suspected of being caused by a genetic polymorphism may be assessed by association analysis. Phenotypic traits suitable for association analysis include diseases that have known but hitherto unmapped genetic components (e.g., agammaglobulinemia, diabetes insipidus, Lesch-Nyhan syndrome, muscular dystrophy, Wiskott-Aldrich syndrome, Fabry's disease, familial hypercholesterolemia, polycystic kidney disease, hereditary spherocytosis, von Willebrand's disease, tuberous sclerosis, hereditary hemorrhagic telangiectasia, familial colonic polyposis, Ehlers-Danlos syndrome, osteogenesis imperfecta, and acute intermittent porphyria).

[0115] Phenotypic traits also include symptoms of, or susceptibility to, multifactorial diseases of which a component is or may be genetic, such as autoimmune diseases, inflammation, cancer, system, diseases of the nervous and infection by pathogenic microorganisms. Some examples of autoimmune diseases include rheumatoid arthritis, multiple sclerosis, diabetes (insulin-dependent and non-independent), systemic lupus erythematosus and Graves disease. Some examples of cancers include cancers of the bladder, brain, breast, colon, esophagus, kidney, oral cavity, ovary, pancreas, prostate, skin, stomach, leukemia, liver, lung, and uterus. Phenotypic traits also include characteristics such as longevity, appearance (e.g., baldness, obesity), strength, speed, endurance, fertility, and susceptibility or receptivity to particular drugs or therapeutic treatments.

[0116] Determination of which polymorphic forms occupy a set of polymorphic sites in an individual identifies a set of polymorphic forms that distinguishes the individual. See generally National Research Council, The Evaluation of Forensic DNA Evidence (Eds. Pollard et al., National Academy Press, DC, 1996). Since the polymorphic sites are within a 50,000 bp region in the human genome, the probability of recombination between these polymorphic sites is low. That low probability means the haplotype (the set of all 10 polymorphic sites) set forth in this application should be inherited without change for at least several generations. The more sites that are analyzed the lower the probability that the set of polymorphic forms in one individual is the same as that in an unrelated individual. Preferably, if multiple sites are analyzed, the sites are unlinked. Thus, polymorphisms of the invention are often used in conjunction with polymorphisms in distal genes. Preferred polymorphisms for use in forensics are diallelic because the population frequencies of two polymorphic forms can usually be determined with greater accuracy than those of multiple polymorphic forms at multi-allelic loci.

[0117] The capacity to identify a distinguishing or unique set of forensic markers in an individual is useful for forensic analysis. For example, one can determine whether a blood sample from a suspect matches a blood or other tissue sample from a crime scene by determining whether the set of polymorphic forms occupying selected polymorphic sites is the same in the suspect and the sample. If the set of polymorphic markers does not match between a suspect and a sample, it can be concluded (barring experimental error) that the suspect was not the source of the sample. If the set of markers does match, one can conclude that the DNA from the suspect is consistent with that found at the crime scene. If frequencies of the polymorphic forms at the loci tested have been determined (e.g., by analysis of a suitable population of individuals), one can perform a statistical analysis to determine the probability that a match of suspect and crime scene sample would occur by chance.

[0118] p(ID) is the probability that two random individuals have the same polymorphic or allelic form at a given polymorphic site. In diallelic loci, four genotypes are possible: AA, AB, BA, and BB. If alleles A and B occur in a haploid genome of the organism with frequencies x and y, the probability of each genotype in a diploid organism are (see WO 95/12607):

Homozygote: p(AA)=x²

Homozygote: p(BB)=y²=(1−x)²

Single Heterozygote: p(AB)=p(BA)=xy=x(1−x)

Both Heterozygotes: p(AB+BA)=2xy=2×(1−x)

[0119] The probability of identity at one locus (i.e, the probability that two individuals, picked at random from a population will have identical polymorphic forms at a given locus) is given by the equation:

p(ID)=(x²)²⁺(2xy)²⁺(y²)².

[0120] These calculations can be extended for any number of polymorphic forms at a given locus. For example, the probability of identity p(ID) for a 3-allele system where the alleles have the frequencies in the population of x, y and z, respectively, is equal to the sum of the squares of the genotype frequencies:

p(ID)=x⁴⁺(2xy)²⁺(2yz)²⁺(2xz)²⁺z⁴⁺y⁴

[0121] In a locus of n alleles, the appropriate binomial expansion is used to calculate p(ID) and p(exc).

[0122] The cumulative probability of identity (cum p(ID)) for each of multiple unlinked loci is determined by multiplying the probabilities provided by each locus:

cum p(ID)=p(ID1)p(ID2)p(ID3) . . . p(IDn)

[0123] The cumulative probability of non-identity for n loci (i.e. the probability that two random individuals will be different at 1 or more loci) is given by the equation:

cum p(nonID)=1−cum p(ID).

[0124] If several polymorphic loci are tested, the cumulative probability of non-identity for random individuals becomes very high (e.g., one billion to one). Such probabilities can be taken into account together with other evidence in determining the guilt or innocence of the suspect.

[0125] The object of paternity testing is usually to determine whether a male is the father of a child. In most cases, the mother of the child is known and thus, the mother's contribution to the child's genotype can be traced. Paternity testing investigates whether the part of the child's genotype not attributable to the mother is consistent with that of the putative father. Paternity testing can be performed by analyzing sets of polymorphisms in the putative father and the child.

[0126] If the set of polymorphisms in the child attributable to the father does not match the putative father, it can be concluded, barring experimental error, that the putative father is not the real father. If the set of polymorphisms in the child attributable to the father does match the set of polymorphisms of the putative father, a statistical calculation can be performed to determine the probability of coincidental match.

[0127] The probability of parentage exclusion (representing the probability that a random male will have a polymorphic form at a given polymorphic site that makes him incompatible as the father) is given by the equation (see WO 95/12607):

p(exc)=xy(1−xy)

[0128] where x and y are the population frequencies of alleles A and B of a diallelic polymorphic site. (At a triallelic site p(exc)=xy(1−xy)+yz(1−yz)+xz(1−xz)+3xyz(1−xyz))), where x, y and z and the respective population frequencies of alleles A, B and C). The probability of non-exclusion is:

p(non-exc)=1−p(exc)

[0129] The cumulative probability of non-exclusion (representing the value obtained when n loci are used) is thus:

cump(non-exc)=p(non-exc1)p(non-exc2)p(non-exc3) . . . p(non-excn)

[0130] The cumulative probability of exclusion for n loci (representing the probability that a random male will be excluded) is:

cump(exc)=1−cum p(non-exc).

[0131] If several polymorphic loci are included in the analysis, the cumulative probability of exclusion of a random male is very high. This probability can be taken into account in assessing the liability of a putative father whose polymorphic marker set matches the child's polymorphic marker set attributable to his/her father.

[0132] The polymorphisms of the invention may contribute to the phenotype of an organism in different ways. Some polymorphisms occur within a protein coding sequence and contribute to phenotype by affecting protein structure. The effect may be neutral, beneficial or detrimental, or both beneficial and detrimental, depending on the circumstances. For example, a heterozygous sickle cell mutation confers resistance to malaria, but a homozygous sickle cell mutation is usually lethal. Other polymorphisms occur in noncoding regions but may exert phenotypic effects indirectly via influence on replication, transcription, and translation. A single polymorphism may affect more than one phenotypic trait. Likewise, a single phenotypic trait may be affected by polymorphisms in different genes. Further, some polymorphisms predispose an individual to a distinct mutation that is causally related to a certain phenotype.

[0133] Phenotypic traits include diseases that have known but hitherto unmapped genetic components. Phenotypic traits also include symptoms of, or susceptibility to, multifactorial diseases of which a component is or may be genetic, such as autoimmune diseases, inflammation, cancer, diseases of the nervous system, and infection by pathogenic microorganisms. Some examples of autoimmune diseases include rheumatoid arthritis, multiple sclerosis, diabetes (insulin-dependent and non-independent), systemic lupus erythematosus and Graves disease. Some examples of cancers include cancers of the bladder, brain, breast, colon, esophagus, kidney, leukemia, liver, lung, oral cavity, ovary, pancreas, prostate, skin, stomach and uterus. Phenotypic traits also include characteristics such as longevity, appearance (e.g., baldness, obesity), strength, speed, endurance, fertility, and susceptibility or receptivity to particular drugs or therapeutic treatments.

[0134] Correlation is performed for a population of individuals who have been tested for the presence or absence of a phenotypic trait of interest and for polymorphic marker sets. To perform such analysis, the presence or absence of a set of polymorphisms (i.e. a polymorphic set) is determined for a set of the individuals, some of whom exhibit a particular trait, and some of whom exhibit lack of the trait. The alleles of each polymorphism of the set are then reviewed to determine whether the presence or absence of a particular allele is associated with the trait of interest. Correlation can be performed by standard statistical methods and statistically significant correlations between polymorphic form(s) and phenotypic characteristics are noted. For example, it might be found that the presence of allele A1 at polymorphism A correlates with heart disease. As a further example, it might be found that the combined presence of allele Al at polymorphism A and allele B 1 at polymorphism B correlates with increased milk production of a farm animal.

[0135] Such correlations can be exploited in several ways. In the case of a strong correlation between a set of one or more polymorphic forms and a disease for which treatment is available, detection of the polymorphic form set in a human or animal patient may justify immediate administration of treatment, or at least the institution of regular monitoring of the patient. Detection of a polymorphic form correlated with serious disease in a couple contemplating a family may also be valuable to the couple in their reproductive decisions. For example, the female partner might elect to undergo in vitro fertilization to avoid the possibility of transmitting such a polymorphism from her husband to her offspring. In the case of a weaker, but still statistically significant correlation between a polymorphic set and human disease, immediate therapeutic intervention or monitoring may not be justified. Nevertheless, the patient can be motivated to begin simple life-style changes (e.g., diet, exercise) that can be accomplished at little cost to the patient but confer potential benefits in reducing the risk of conditions to which the patient may have increased susceptibility by virtue of variant alleles. Identification of a polymorphic set in a patient correlated with enhanced receptiveness to one of several treatment regimes for a disease indicates that this treatment regime should be followed.

[0136] For animals and plants, correlations between characteristics and phenotype are useful for breeding for desired characteristics. For example, Beitz et al., U.S. Pat. No. 5,292,639 discuss use of bovine mitochondrial polymorphisms in a breeding program to improve milk production in cows. To evaluate the effect of mtDNA D-loop sequence polymorphism on milk production, each cow was assigned a value of 1 if variant or 0 if wild type with respect to a prototypical mitochondrial DNA sequence at each of 17 locations considered.

[0137] The previous section concerns identifying correlations between phenotypic traits and polymorphisms that directly or indirectly contribute to those traits. The present section describes identification of a physical linkage between a genetic locus associated with a trait of interest and polymorphic markers that are not associated with the trait, but are in physical proximity with the genetic locus responsible for the trait and co-segregate with it. Such analysis is useful for mapping a genetic locus associated with a phenotypic trait to a chromosomal position, and thereby cloning gene(s) responsible for the trait. See Lander et al., Proc. Natl. Acad. Sci. (USA) 83, 7353-7357 (1986); Lander et al., Proc. Natl. Acad. Sci. (USA) 84, 2363-2367 (1987); Donis-Keller et al., Cell 51, 319-337 (1987); Lander et al., Genetics 121, 185-199 (1989)). Genes localized by linkage can be cloned by a process known as directional cloning. See Wainwright, Med. J. Australia 159, 170-174 (1993); Collins, Nature Genetics 1, 3-6 (1992) (each of which is incorporated by reference in its entirety for all purposes).

[0138] Linkage studies are typically performed on members of a family. Available members of the family are characterized for the presence or absence of a phenotypic trait and for a set of polymorphic markers. The distribution of polymorphic markers in an informative meiosis is then analyzed to determine which polymorphic markers co-segregate with a phenotypic trait. See, e.g., Kerem et al., Science 245, 1073-1080 (1989); Monaco et al., Nature 316, 842 (1985); Yamoka et al., Neurology 40, 222-226 (1990); Rossiter et al., FASEB Journal 5, 21-27 (1991).

[0139] Linkage is analyzed by calculation of LOD (log of the odds) values. A lod value is the relative likelihood of obtaining observed segregation data for a marker and a genetic locus when the two are located at a recombination fraction RF, versus the situation in which the two are not linked, and thus segregating independently (Thompson & Thompson, Genetics in Medicine (5th ed, W. B. Saunders Company, Philadelphia, 1991); Strachan, “Mapping the human genome” in The Human Genome (BIOS Scientific Publishers Ltd, Oxford), Chapter 4). A series of likelihood ratios are calculated at various recombination fractions (RF), ranging from RF=0.0 (coincident loci) to RF=0.50 (unlinked). Thus, the likelihood at a given value of RF is: probability of data if loci linked at RF to probability of data if loci unlinked. The computed likelihood is usually expressed as the log₁₀ of this ratio (i.e., a lod score). For example, a lod score of 3 indicates 1000:1 odds against an apparent observed linkage being a coincidence. The use of logarithms allows data collected from different families to be combined by simple addition. Computer programs are available for the calculation of lod scores for differing values of RF (e.g., LIPED, MLINK (Lathrop, Proc. Nat. Acad. Sci. (USA) 81, 3443-3446 (1984)). For any particular lod score, a recombination fraction may be determined from mathematical tables. See Smith et al., Mathematical tables for research workers in human genetics (Churchill, London, 1961); Smith, Ann. Hum. Genet. 32, 127-150 (1968). The value of RF at which the lod score is the highest is considered to be the best estimate of the recombination fraction.

[0140] Positive lod score values suggest that the two loci are linked, whereas negative values suggest that linkage is less likely (at that value of RF) than the possibility that the two loci are unlinked. By convention, a combined lod score of +3 or greater (equivalent to greater than 1000:1 odds in favor of linkage) is considered definitive evidence that two loci are linked. Similarly, by convention, a negative lod score of −2 or less is taken as definitive evidence against linkage of the two loci being compared. Negative linkage data are useful in excluding a chromosome or a segment thereof from consideration. The search focuses on the remaining non-excluded chromosomal locations.

[0141] The invention further provides transgenic nonhuman animals capable of expressing an exogenous variant gene and/or having one or both alleles of an endogenous variant gene inactivated. Expression of an exogenous variant gene is usually achieved by operably linking the gene to a promoter and optionally an enhancer, and microinjecting the construct into a zygote. See Hogan et al., “Manipulating the Mouse Embryo, A Laboratory Manual,” Cold Spring Harbor Laboratory. (1989). Inactivation of endogenous variant genes can be achieved by forming a transgene in which a cloned variant gene is inactivated by insertion of a positive selection marker. See Capecchi, Science 244, 1288-1292 The transgene is then introduced into an embryonic stem cell, where it undergoes homologous recombination with an endogenous variant gene. Mice and other rodents are preferred animals. Such animals provide useful drug screening systems.

[0142] The invention further provides methods for assessing the pharmacogenomic susceptibility of a subject harboring a single nucleotide polymorphism to a particular pharmaceutical compound, or to a class of such compounds. Genetic polymorphism in drug-metabolizing enzymes, drug transporters, receptors for pharmaceutical agents, and other drug targets have been correlated with individual differences based on distinction in the efficacy and toxicity of the pharmaceutical agent administered to a subject. Pharmocogenomic characterization of a subjects susceptibility to a drug enhances the ability to tailor a dosing regimen to the particular genetic constitution of the subject, thereby enhancing and optimizing the therapeutic effectiveness of the therapy.

[0143] In cases in which a cSNP leads to a polymorphic protein that is ascribed to be the cause of a pathological condition, method of treating such a condition includes administering to a subject experiencing the pathology the wild type cognate of the polymorphic protein. Once administered in an effective dosing regimen, the wild type cognate provides complementation or remediation of the defect due to the polymorphic protein. The subject's condition is ameliorated by this protein therapy.

[0144] A subject suspected of suffering from a pathology ascribable to a polymorphic protein that arises from a cSNP is to be diagnosed using any of a variety of diagnostic methods capable of identifying the presence of the cSNP in the nucleic acid, or of the cognate polymorphic protein, in a suitable clinical sample taken from the subject. Once the presence of the cSNP has been ascertained, and the pathology is correctable by administering a normal or wild-type gene, the subject is treated with a pharmaceutical composition that includes a nucleic acid that harbors the correcting wild-type gene, or a fragment containing a correcting sequence of the wild-type gene. Non-limiting examples of ways in which such a nucleic acid may be administered include incorporating the wild-type gene in a viral vector, such as an adenovirus or adeno associated virus, and administration of a naked DNA in a pharmaceutical composition that promotes intracellular uptake of the administered nucleic acid. Once the nucleic acid that includes the gene coding for the wild-type allele of the polymorphism is incorporated within a cell of the subject, it will initiate de novo biosynthesis of the wild-type gene product. if the nucleic acid is further incorporated into the genome of the subject, the treatment will have long-term effects, providing de novo synthesis of the wild-type protein for a prolonged duration. The synthesis of the wild-type protein in the cells of the subject will contribute to a therapeutic enhancement of the clinical condition of the subject.

[0145] A subject suffering from a pathology ascribed to a SNP may be treated so as to correct the genetic defect. (See Kren et al., Proc. Natl. Acad. Sci. USA 96:10349-10354 (1999)). Such a subject is identified by any method that can detect the polymorphism in a sample drawn from the subject. Such a genetic defect may be permanently corrected by administering to such a subject a nucleic acid fragment incorporating a repair sequence that supplies the wild-type nucleotide at the position of the SNP. This site-specific repair sequence encompasses an RNA/DNA oligonucleotide which operates to promote endogenous repair of a subject's genomic DNA. Upon administration in an appropriate vehicle, such as a complex with polyethylenimine or encapsulated in anionic liposomes, a genetic defect leading to an inborn pathology may be overcome, as the chimeric oligonucleotides induces incorporation of the wild-type sequence into the subject's genome. Upon incorporation, the wild-type gene product is expressed, and the replacement is propagated, thereby engendering a permanent repair.

[0146] The invention further provides kits comprising at least one allele-specific oligonucleotide as described above. Often, the kits contain one or more pairs of allele-specific oligonucleotides hybridizing to different forms of a polymorphism. In some kits, the allele-specific oligonucleotides are provided immobilized to a substrate. For example, the same substrate can comprise allele-specific oligonucleotide probes for detecting at least 10, 100, 1000 or all of the polymorphisms shown in the Table. Optional additional components of the kit include, for example, restriction enzymes, reverse-transcriptase or polymerase, the substrate nucleoside triphosphates, means used to label (for example, an avidin-enzyme conjugate and enzyme substrate and chromogen if the label is biotin), and the appropriate buffers for reverse transcription, PCR, or hybridization reactions. Usually, the kit also contains instructions for carrying out the hybridizing methods.

[0147] Several aspects of the present invention rely on having available the polymorphic proteins encoded by the nucleic acids comprising a SNP of the inventions. There are various methods of isolating these nucleic acid sequences. For example, DNA is isolated from a genomic or cDNA library using labeled oligonucleotide probes having sequences complementary to the sequences disclosed herein.

[0148] Such probes can be used directly in hybridization assays. Alternatively probes can be designed for use in amplification techniques such as PCR.

[0149] To prepare a cDNA library, mRNA is isolated from tissue such as heart or pancreas, preferably a tissue wherein expression of the gene or gene family is likely to occur. cDNA is prepared from the mRNA and ligated into a recombinant vector. The vector is transfected into a recombinant host for propagation, screening and cloning. Methods for making and screening cDNA libraries are well known, See Gubler, U. and Hoffman, B. J. Gene 25:263-269 (1983) and Sambrook et al.

[0150] For a genomic library, for example, the DNA is extracted from tissue and either mechanically sheared or enzymatically digested to yield fragments of about 12-20 kb. The fragments are then separated by gradient centrifugation from undesired sizes and are constructed in bacteriophage lambda vectors. These vectors and phage are packaged in vitro, as described in Sambrook, et al. Recombinant phage are analyzed by plaque hybridization as described in Benton and Davis, Science 196:180-1 82 (1977). Colony hybridization is carried out as generally described in M. Grunstein et al. Proc. Natl. Acad. Sci. USA. 72:3961-3965 (1975). DNA of interest is identified in either cDNA or genomic libraries by its ability to hybridize with nucleic acid probes, for example on Southern blots, and these DNA regions are isolated by standard methods familiar to those of skill in the art. See Sambrook, et al.

[0151] In PCR techniques, oligonucleotide primers complementary to the two 3′ borders of the DNA region to be amplified are synthesized. The polymerase chain reaction is then carried out using the two primers. See PCR Protocols: a Guide to Methods and Applications (Innis, M, Gelfand, D., Sninsky, J. and White, T., eds.), Academic Press, San Diego (1990). Primers can be selected to amplify the entire regions encoding a full-length sequence of interest or to amplify smaller DNA segments as desired. PCR can be used in a variety of protocols to isolate cDNAs encoding a sequence of interest. In these protocols, appropriate primers and probes for amplifying DNA encoding a sequence of interest are generated from analysis of the DNA sequences listed herein. Once such regions are PCR-amplified, they can be sequenced and oligonucleotide probes can be prepared from the sequence.

[0152] Once DNA encoding a sequence comprising a cSNP is isolated and cloned, one can express the encoded polymorphic proteins in a variety of recombinantly engineered cells. It is expected that those of skill in the art are knowledgeable in the numerous expression systems available for expression of DNA encoding a sequence of interest. No attempt to describe in detail the various methods known for the expression of proteins in prokaryotes or eukaryotes is made here.

[0153] In brief summary, the expression of natural or synthetic nucleic acids encoding a sequence of interest will typically be achieved by operably linking the DNA or cDNA to a promoter (which is either constitutive or inducible), followed by incorporation into an expression vector. The vectors can be suitable for replication and integration in either prokaryotes or eukaryotes. Typical expression vectors contain initiation sequences, transcription and translation terminators, and promoters useful for regulation of the expression of a polynucleotide sequence of interest. To obtain high level expression of a cloned gene, it is desirable to construct expression plasmids which contain, at the minimum, a strong promoter to direct transcription, a ribosome binding site for translational initiation, and a transcription/translation terminator. The expression vectors may also comprise generic expression cassettes containing at least one independent terminator sequence, sequences permitting replication of the plasmid in both eukaryotes and prokaryotes, i.e., shuttle vectors, and selection markers for both prokaryotic and eukaryotic systems. See Sambrook et al.

[0154] A variety of prokaryotic expression systems may be used to express the polymorphic proteins of the invention. Examples include E. coli, Bacillus, Streptomyces, and the like.

[0155] It is preferred to construct expression plasmids which contain, at the minimum, a strong promoter to direct transcription, a ribosome binding site for translational initiation, and a transcription/translation terminator. Examples of regulatory regions suitable for this purpose in E. coli are the promoter and operator region of the E. coli tryptophan biosynthetic pathway as described by Yanofsky, C., J. Bacterial. 158:1018-1024 (1984) and the leftward promoter of phage lambda as described by A, I. and Hagen, D., Ann. Rev. Genet. 14:399445 (1980). The inclusion of selection markers in DNA vectors transformed in E. coli is also useful. Examples of such markers include genes specifying resistance to ampicillin, tetracycline, or chloramphenicol. See Sambrook et al. for details concerning selection markers for use in E. coli.

[0156] To enhance proper folding of the expressed recombinant protein, during purification from E. coli, the expressed protein may first be denatured and then renatured. This can be accomplished by solubilizing the bacterially produced proteins in a chaotropic agent such as guanidine HCl and reducing all the cysteine residues with a reducing agent such as beta-mercaptoethanol. The protein is then renatured, either by slow dialysis or by gel filtration. See U.S. Pat. No. 4,511,503. Detection of the expressed antigen is achieved by methods known in the art as radioimmunoassay, or Western blotting techniques or immunoprecipitation. Purification from E. coli can be achieved following procedures such as those described in U.S. Pat. No. 4,511,503.

[0157] Any of a variety of eukaryotic expression systems such as yeast, insect cell lines, bird, fish, and mammalian cells, may also be used to express a polymorphic protein of the invention. As explained briefly below, a nucleotide sequence harboring a cSNP may be expressed in these eukaryotic systems. Synthesis of heterologous proteins in yeast is well known. Methods in Yeast Genetics. Sherman, F., et al., Cold Spring Harbor Laboratory, (1982) is a well recognized work describing the various methods available to produce the protein in yeast. Suitable vectors usually have expression control sequences, such as promoters, including 3-phosphogtycerate kinase or other glycolytic enzymes, and an origin of replication, termination sequences and the like as desired. For instance, suitable vectors are described in the literature (Botstein, et al., Gene 8:17-24 (1979); Broach, et al., Gene 8:121-133 (1979)).

[0158] Two procedures are used in transforming yeast cells. In one case, yeast cells are first converted into protoplasts using zymolyase, lyticase or glusulase, followed by addition of DNA and polyethylene glycol (PEG). The PEG-treated protoplasts are then regenerated in a 3% agar medium under selective conditions. Details of this procedure are given in the papers by J. D. Beggs, Nature (London) 275:104-109 (1978); and Hinnen, A., et al., Proc. Natl. Acad. Sci. USA, 75:1929-1933 (1978). The second procedure does not involve removal of the cell wall. Instead the cells are treated with lithium chloride or acetate and PEG and put on selective plates (Ito, H., et al., J. Bact, 153163-168 (1983)) cells and applying standard protein isolation techniques to the lysates:

[0159] The purification process can be monitored by using Western blot techniques or radioimmunoassay or other standard techniques. The sequences encoding the proteins of the invention can also be ligated to various immunoassay expression vectors for use in transforming cell cultures of, for instance, mammalian, insect, bird or fish origin. Illustrative of cell cultures useful for the production of the polypeptides are mammalian cells. Mammalian cell systems often will be in the form of monolayers of cells although mammalian cell suspensions may also be used. A number of suitable host cell lines capable of expressing intact proteins have been developed in the art, and include the HEK293, BHK21, and CHO cell lines, and various human cells such as COS cell lines, HeLa cells, myeloma cell lines, Jurkat cells, etc. Expression vectors for these cells can include expression control sequences, such as an origin of replication, a promoter (e.g., the CMV promoter, a HSV tk promoter or pgk (phosphoglycerate kinase) promoter), an enhancer (Queen et al. Immunol. Rev, 89:49 (1986)) and necessary processing information sites, such as ribosome binding sites, RNA splice sites, polyadenylation sites (e.g., an SV40 large T Ag poly A addition site), and transcriptional terminator sequences.

[0160] Other animal cells are available, for instance, from the American Type Culture Collection Catalogue of Cell Lines and Hybridomas (7th edition, (1992)). Appropriate vectors for expressing the proteins of the invention in insect cells are usually derived from baculovirus. Insect cell lines include mosquito larvae, silkworm, armyworm, moth and Drosophila cell lines such as a Schneider cell line (See Schneider J. Embryol. Exp. Morphol., 27:353-365 (1987). As indicated above, the vector, e.g., a plasmid, which is used to transform the host cell, preferably contains DNA sequences to initiate transcription and sequences to control the translation of the protein. These sequences are referred to as expression control sequences. As with yeast, when higher animal host cells are employed, polyadenylation or transcription terminator sequences from known mammalian genes need to be incorporated into the vector. An example of a terminator sequence is the polyadenylation sequence from the bovine growth hormone gene. Sequences for accurate splicing of the transcript may also be included. An example of a splicing sequence is the VP1 intron from SV40 (Sprague, J. et al., J. Virol. 45: 773-781 (1983)). Additionally, gene sequences to control replication in the host cell may be Saveria-Campo, M., 1985, “Bovine Papilloma virus DNA a Eukaryotic Cloning Vector” in DNA Cloning Vol. II a Practical Approach Ed. D. M. Glover, IRL Press, Arlington, Va. pp. 213-238. The host cells are competent or rendered competent for transformation by various means. There are several well-known methods of introducing DNA into animal cells. These include: calcium phosphate precipitation, fusion of the recipient cells with bacterial protoplasts containing the DNA, treatment of the recipient cells with liposomes containing the DNA, DEAE dextran, electroporation and micro-injection of the DNA directly into the cells.

[0161] The transformed cells are cultured by means well known in the art (Biochemical Methods in Cell Culture and Virology, Kuchler, R. J., Dowden, Hutchinson and Ross, Inc., (1977)). The expressed polypeptides are isolated from cells grown as suspensions or as monolayers. The latter are recovered by well known mechanical, chemical or enzymatic means.

[0162] General methods of expressing recombinant proteins are also known and are exemplified in R. Kaufman, Methods in Enzymology 185, 537-566 (1990). As defined herein “operably linked” refers to linkage of a promoter upstream from a DNA sequence such that the promoter mediates transcription of the DNA sequence. Specifically, “operably linked” means that the isolated polynucleotide of the invention and an expression control sequence are situated within a vector or cell in such a way that the gene encoding the protein is expressed by a host cell which has been transformed (transfected) with the ligated polynucleotide/expression sequence. The term “vector”, refers to viral expression systems, autonomous self-replicating circular DNA (plasmids), and includes both expression and nonexpression plasmids.

[0163] The term “gene” as used herein is intended to refer to a nucleic acid sequence which encodes a polypeptide. This definition includes various sequence polymorphisms, mutations, and/or sequence variants wherein such alterations do not affect the function of the gene product. The term “gene” is intended to include not only coding sequences but also regulatory regions such as promoters, enhancers, termination regions and similar untranslated nucleotide sequences. The term further includes all introns and other DNA sequences spliced from the mRNA transcript, along with variants resulting from alternative splice sites.

[0164] A number of types of cells may act as suitable host cells for expression of the protein. Mammalian host cells include, for example, monkey COS cells, Chinese Hamster Ovary (CHO) cells, human kidney 293 cells, human epidermal A43 1 cells, human Co10205 cells, 3T3 cells, CV-1 cells, other transformed primate cell lines, normal diploid cells, cell strains derived from in vitro culture of primary tissue, primary explants, HeLa cells, mouse L cells, BHK, HL-60, U937, HaK or Jurkat cells. Alternatively, it may be possible to produce the protein in lower eukaryotes such as yeast or in prokaryotes such as bacteria. Potentially suitable yeast strains include Saccharomyces cerevisiae, Schizosaccharbmyces pombe, Kluyveromyces strains, Candida or any yeast strain capable of expressing heterologous proteins. Potentially suitable bacterial strains include Escherichia coli, Bacillus subtilis, Salmonella typhimurium, or any bacterial strain capable of expressing heterologous proteins. If the protein is made in yeast or bacteria, it may be necessary to modify the protein produced therein, for example by phosphorylation or glycosylation of the appropriate sites, in order to obtain the functional protein.

[0165] The protein may also be produced by operably linking the isolated polynucleotide of the invention to suitable control sequences in one or more insect expression vectors, and employing an insect expression system. Materials and methods for baculovirus/insect cell expression systems are commercially available in kit form from, e.g., Invitrogen, San Diego, Calif., U.S.A. (the MaxBac© kit), and such methods are well known in the art, as described in Summers and Smith, Texas Agricultural Experiment Station Bulletin No. 1555 (1987), incorporated herein by reference. As used herein, an insect cell capable of expressing a polynucleotide of the present invention is “transformed.” The protein of the invention may be prepared by culturing transformed host cells under culture conditions suitable to express the recombinant protein.

[0166] The polymorphic protein of the invention may also be expressed as a product of transgenic animals, e.g., as a component of the milk of transgenic cows, goats, pigs, or sheep which are characterized by somatic or germ cells containing a nucleotide sequence encoding the protein. The protein may also be produced by known conventional chemical synthesis. Methods for constructing the proteins of the present invention by synthetic means are known to those skilled in the art.

[0167] The polymorphic proteins produced by recombinant DNA technology may be purified by techniques commonly employed to isolate or purify recombinant proteins. Recombinantly produced proteins can be directly expressed or expressed as a fusion protein. The protein is then purified by a combination of cell lysis (e.g., sonication) and affinity chromatography. For fusion products, subsequent digestion of the fusion protein with an appropriate proteolytic enzyme releases the desired polypeptide. The polypeptides of this invention may be purified to substantial purity by standard techniques well known in the art, including selective precipitation with such substances as ammonium sulfate, column chromatography, immunopurification methods, and others. See, for instance, R. Scopes, Protein Purification: Principles and Practice, Springer-Verlag: New York (1982), incorporated herein by reference. For example, in an embodiment, antibodies may be raised to the proteins of the invention as described herein. Cell membranes are isolated from a cell line expressing the recombinant protein, the protein is extracted from the membranes and immunoprecipitated. The proteins may then be further purified by standard protein chemistry techniques as described above.

[0168] The resulting expressed protein may then be purified from such culture (i.e., from culture medium or cell extracts) using known purification processes, such as gel filtration and ion exchange chromatography. The purification of the protein may also include an affinity column containing agents which will bind to the protein; one or more column steps over such affinity resins as concanavalin A-agarose, heparin-Toyopearl@ or Cibacrom blue 3GA Sepharose B; one or more steps involving hydrophobic interaction chromatography using such resins as phenyl ether, butyl ether, or propyl ether; or immunoaffinity chromatography. Alternatively, the protein of the invention may also be expressed in a form which will facilitate purification. For example, it may be expressed as a fusion protein, such as those of maltose binding protein (MBP), glutathione-S-transferase (GST) or thioredoxin (TRX). Kits for expression and purification of such fusion proteins are commercially available from New England BioLab (Beverly, Mass.), Pharmacia (Piscataway, N.J.) and InVitrogen, respectively. The protein can also be tagged with an epitope and subsequently purified by using a specific antibody directed to such epitope. One such epitope (“Flag”) is commercially available from Kodak (New Haven, Conn.). Finally, one or more reverse-phase high performance liquid chromatography (RP-HPLC) steps employing hydrophobic RP-HPLC media, e.g., silica gel having pendant methyl or other aliphatic groups, can be employed to further purify the protein. Some or all of the foregoing purification steps, in various combinations, can also be employed to provide a substantially homogeneous isolated recombinant protein. The protein thus purified is substantially free of other mammalian proteins and is defined in accordance with the present invention as an “isolated protein.”

[0169] The term “antibody” as used herein refers to immunoglobulin molecules and immunologically active portions of immunoglobulin molecules, i.e., molecules that contain an antigen binding site that specifically binds (immunoreacts with) an antigen, such as polymorphic. Such antibodies include, but are not limited to, polyclonal, monoclonal, chimeric, single chain, F_{ab} and F_{(ab′)2} fragments, and an F_{ab} expression library. In a specific embodiment, antibodies to human polymorphic proteins are disclosed.

[0170] The phrase “specifically binds to”, “immunospecifically binds to” or is “specifically immunoreactive with”, an antibody when referring to a protein or peptide, refers to a binding reaction which is determinative of the presence of the protein in the presence of a heterogeneous population of proteins and other biological materials. Thus, for example, under designated immunoassay conditions, the specified antibodies bind to a particular protein and do not bind in a significant amount to other proteins present in the sample. Specific binding to an antibody under such conditions may require an antibody that is selected for its specificity for a particular protein. Of particular interest in the present invention is an antibody that binds immunospecifically to a polymorphic protein but not to its cognate wild type allelic protein, or vice versa. A variety of immunoassay formats may be used to select antibodies specifically immunoreactive with a particular protein. For example, solid-phase ELISA immunoassays are routinely used to select monoclonal antibodies specifically immunoreactive with a protein. See Harlow and Lane (1988) Antibodies, a Laboratory Manual, Cold Spring Harbor Publications, New York, for a description of immunoassay formats and conditions that can be used to determine specific immunoreactivity.

[0171] Polyclonal and/or monoclonal antibodies that immunospecifically bind to polymorphic gene products but not to the corresponding prototypical or “wild-type” gene products are also provided. Antibodies can be made by injecting mice or other animals with the variant gene product or synthetic peptide. Monoclonal antibodies are screened as are described, for example, in Harlow & Lane, Antibodies, A Laboratory Manual, Cold Spring Harbor Press, New York (1988); Goding, Monoclonal antibodies, Principles and Practice (2d ed.) Academic Press, New York (1986). Monoclonal antibodies are tested for specific immunoreactivity with a variant gene product and lack of immunoreactivity to the corresponding prototypical gene product.

[0172] An isolated polymorphic protein, or a portion or fragment thereof, can be used as an immunogen to generate the antibody that binds the polymorphic protein using standard techniques for polyclonal and monoclonal antibody preparation. The full-length polymorphic protein can be used or, alternatively, the invention provides antigenic peptide fragments of polymorphic for use as immunogens. The antigenic peptide of a polymorphic protein of the invention comprises at least 8 amino acid residues of the amino acid sequence encompassing the polymorphic amino acid and encompasses an epitope of the polymorphic protein such that an antibody raised against the peptide forms a specific immune complex with the polymorphic protein. Preferably, the antigenic peptide comprises at least 10 amino acid residues, more preferably at least 15 amino acid residues, even more preferably at least 20 amino acid residues, and most preferably at least 30 amino acid residues. Preferred epitopes encompassed by the antigenic peptide are regions of polymorphic that are located on the surface of the protein, e.g., hydrophilic regions.

[0173] For the production of polyclonal antibodies, various suitable host animals (e.g., rabbit, goat, mouse or other mammal) may be immunized by injection with the polymorphic protein. An appropriate immunogenic preparation can contain, for example, recombinantly expressed polymorphic protein or a chemically synthesized polymorphic polypeptide. The preparation can further include an adjuvant. Various adjuvants used to increase the immunological response include, but are not limited to, Freund's (complete and incomplete), mineral gels (e.g., aluminum hydroxide), surface active substances (e.g., lysolecithin, pluronic polyols, polyanions, peptides, oil emulsions, dinitrophenol, etc.), human adjuvants such as Bacille Calmette-Guerin and Corynebacterium parvum, or similar immunostimulatory agents. If desired, the antibody molecules directed against polymorphic proteins can be isolated from the mammal (e.g., from the blood) and further purified by well known techniques, such as protein A chromatography, to obtain the IgG fraction.

[0174] The term “monoclonal antibody” or “monoclonal antibody composition”, as used herein, refers to a population of antibody molecules that originates from the clone of a singly hybridoma cell, and that contains only one type of antigen binding site capable of immunoreacting with a particular epitope of a polymorphic protein. A monoclonal antibody composition thus typically displays a single binding affinity for a particular polymorphic protein with which it immunoreacts. For preparation of monoclonal antibodies directed towards a particular polymorphic protein, or derivatives, fragments, analogs or homologs thereof, any technique that provides for the production of antibody molecules by continuous cell line culture may be utilized. Such techniques include, but are not limited to, the hybridoma technique (see Kohler & Milstein, 1975 Nature 256: 495-497); the trioma technique; the human B-cell hybridoma technique (see Kozbor, et al., 1983 Immunol Today 4: 72) and the EBV hybridoma technique to produce human monoclonal antibodies (see Cole, et al., 1985 In: MONOCLONAL ANTIBODIES AND CANCER THERAPY, Alan R. Liss, Inc., pp. 77-96). Human monoclonal antibodies may be utilized in the practice of the present invention and may be produced by using human hybridomas (see Cote, et al., 1983. Proc Natl Acad Sci USA 80: 2026-2030) or by transforming human B-cells with Epstein Barr Virus in vitro (see Cole, et al., 1985 In: MONOCLONAL ANTIBODIES AND CANCER THERAPY, Alan R. Liss, Inc., pp. 77-96).

[0175] According to the invention, techniques can be adapted for the production of single-chain antibodies specific to a polymorphic protein (see e.g., U.S. Pat. No. 4,946,778). In addition, methodologies can be adapted for the construction of F_{ab} expression libraries (see e.g., Huse, et al., 1989 Science 246: 1275-1281) to allow rapid and effective identification of monoclonal F_{ab} fragments with the desired specificity for a polymorphic protein or derivatives, fragments, analogs or homologs thereof. Non-human antibodies can be “humanized” by techniques well known in the art. See e.g., U.S. Pat. No. 5,225,539. Antibody fragments that contain the idiotypes to a polymorphic protein may be produced by techniques known in the art including, but not limited to: (i) an F(ab′)₂ fragment produced by pepsin digestion of an antibody molecule; (ii) an F_{ab} fragment generated by reducing the disulfide bridges of an F_{(ab′)2} fragment; (iii) an F_{ab} fragment generated by the treatment of the antibody molecule with papain and a reducing agent and (iv) Fᵥ fragments.

[0176] Additionally, recombinant anti-polymorphic protein antibodies, such as chimeric and humanized monoclonal antibodies, comprising both human and non-human portions, which can be made using standard recombinant DNA techniques, are within the scope of the invention. Such chimeric and humanized monoclonal antibodies can be produced by recombinant DNA techniques known in the art, for example using methods described in PCT International Application No. PCT/US86/02269; European Patent Application No. 184,187; European Patent Application No. 171,496; European Patent Application No. 173,494; PCT International Publication No. WO 86/01533; U.S. Pat. No. 4,816,567; European Patent Application No. 125,023; Better et al. (1988) Science 240:1041-1043, Liu et al. (1987) PNAS 84:3439-3443; Liu et al. (1987) J. Immunol. 139:3521-3526; Sun et al. (1987) PNAS 84:214-218; Nishimura et al. (1987) Cancer Res 47:999-1005; Wood et al. (1985) Nature 314:446-449; Shaw et al. (1988) J Natl Cancer Inst 80:1553-1559); Morrison(1985) Science 229:1202-1207; Oi et al. (1986) BioTechniques 4:214; U.S. Pat. No. 5,225,539; Jones et al. (1986) Nature 321:552-525; Verhoeyan et al. (1988) Science 239:1534; and Beidler et al. (1988) J Immunol 141:4053-4060.

[0177] In one embodiment, methodologies for the screening of antibodies that possess the desired specificity include, but are not limited to, enzyme-linked immunosorbent assay (ELISA) and other immunologically-mediated techniques known within the art.

[0178] Anti-polymorphic protein antibodies may be used in methods known within the art relating to the detection, quantitation and/or cellular or tissue localization of a polymorphic protein (e.g., for use in measuring levels of the polymorphic protein within appropriate physiological samples, for use in diagnostic methods, for use in imaging the protein, and the like). In a given embodiment, antibodies for polymorphic proteins, or derivatives, fragments, analogs or homologs thereof, that contain the antibody-derived CDR, are utilized as pharmacologically-active compounds in therapeutic applications intended to treat a pathology in a subject that arises from the presence of the cSNP allele in the subject.

[0179] An anti-polymorphic protein antibody (e.g., monoclonal antibody) can be used to isolate polymorphic proteins by a variety of immunochemical techniques, such as immunoaffinity chromatography or immunoprecipitation. An anti-polymorphic protein antibody can facilitate the purification of natural polymorphic protein from cells and of recombinantly produced polymorphic proteins expressed in host cells. Moreover, an anti-polymorphic protein antibody can be used to detect polymorphic protein (e.g., in a cellular lysate or cell supernatant) in order to evaluate the abundance and pattern of expression of the polymorphic protein. Anti-polymorphic antibodies can be used diagnostically to monitor protein levels in tissue as part of a clinical testing procedure, e.g., to, for example, determine the efficacy of a given treatment regimen. Detection can be facilitated by coupling (i.e., physically linking) the antibody to a detectable substance. Examples of detectable substances include various enzymes, prosthetic groups, fluorescent materials, luminescent materials, bioluminescent materials, and radioactive materials. Examples of suitable enzymes include horseradish peroxidase, alkaline phosphatase, β-galactosidase, or acetylcholinesterase; examples of suitable prosthetic group complexes include streptavidin/biotin and avidin/biotin; examples of suitable fluorescent materials include umbelliferone, fluorescein, fluorescein isothiocyanate, rhodamine, dichlorotriazinylamine fluorescein, dansyl chloride or phycoerythrin; an example of a luminescent material includes luminol; examples of bioluminescent materials include luciferase, luciferin, and aequorin, and examples of suitable radioactive material include 125I, ¹³¹I, ³⁵S or ³H.

### Equivalents

[0180] From the foregoing detailed description of the specific embodiments of the invention, it should be apparent that unique compositions and methods of use thereof in SNPs in known genes have been described. Although particular embodiments have been disclosed herein in detail, this has been done by way of example for purposes of illustration only, and is not intended to be limiting with respect to the scope of the appended claims which follow. In particular, it is contemplated by the inventor that various substitutions, alterations, and modifications may be made to the invention without departing from the spirit and scope of the invention as defined by the claims.

What is claimed is:

1. An isolated polynucleotide selected from the group consisting of:
a) a nucleotide sequence comprising one or more polymorphic sequences selected from the group consisting of SEQ ID NOS:1-1468;
b) a fragment of said nucleotide sequence, provided that the fragment includes a polymorphic site in said polymorphic sequence;
c) a complementary nucleotide sequence comprising a sequence complementary to one or more of said polymorphic sequences selected from the group consisting of SEQ ID NOS:1-1468; and
d) a fragment of said complementary nucleotide sequence, provided that the fragment includes a polymorphic site in said polymorphic sequence.

2. The polynucleotide of claim 1, wherein said polynucleotide sequence is DNA.

3. The polynucleotide of claim 1, wherein said polynucleotide sequence is RNA.

4. The polynucleotide of claim 1, wherein said polynucleotide sequence is between about 10 and about 100 nucleotides in length.

5. The polynucleotide of claim 1, wherein said polynucleotide sequence is between about 10 and about 90 nucleotides in length.

6. The polynucleotide of claim 1, wherein said polynucleotide sequence is between about 10 and about 75 nucleotides in length.

7. The polynucleotide of claim 1, wherein said polynucleotide is between about 10 and about 50 bases in length.

8. The polynucleotide of claim 1, wherein said polynucleotide is between about 10 and about 40 bases in length.

9. The polynucleotide of claim 1, wherein said polynucleotide is between about 15 and about 30 bases in length.

10. The polynucleotide of claim 1, wherein said polymorphic site includes a nucleotide other than the nucleotide listed in Table 1, column 5 for said polymorphic sequence.

11. The polynucleotide of claim 1, wherein the complement of said polymorphic site includes a nucleotide other than the complement of the nucleotide listed in Table 1, column 5 for the complement of said polymorphic sequence.

12. The polynucleotide of claim 1, wherein said polymorphic site includes the nucleotide listed in Table 1, column 6 for said polymorphic sequence.

13. The polynucleotide of claim 1, wherein the complement of said polymorphic site includes the complement of the nucleotide listed in Table 1, column 6 for said polymorphic sequence.

14. An isolated allele-specific oligonucleotide that hybridizes to a first polynucleotide at a polymorphic site encompassed therein, wherein the first polynucleotide is selected from the group consisting of:
a) a nucleotide sequence comprising one or more polymorphic sequences selected from the group consisting of SEQ ID NOS:1-1468 provided that the polymorphic sequence includes a nucleotide other than the nucleotide recited in Table 1, column 5 for said polymorphic sequence;
b) a nucleotide sequence that is a fragment of said polymorphic sequence, provided that the fragment includes a polymorphic site in said polymorphic sequence;
c) a complementary nucleotide sequence comprising a sequence complementary to one or more polymorphic sequences selected from the group consisting of SEQ ID NOS:1-1468, provided that the complementary nucleotide sequence includes a nucleotide other than the complement of the nucleotide recited in Table 1, column 5; and
d) a nucleotide sequence that is a fragment of said complementary sequence, provided that the fragment includes a polymorphic site in said polymorphic sequence.

15. The oligonucleotide of claim 14, wherein the oligonucleotide does not hybridize under stringent conditions to a second polynucleotide selected from the group consisting of:
a) a nucleotide sequence comprising one or more polymorphic sequences selected from the group consisting of SEQ ID NOS:1-1468, wherein said polymorphic sequence includes the nucleotide listed in Table 1, column 5 for said polymorphic sequence;
b) a nucleotide sequence that is a fragment of any of said nucleotide sequences;
c) a complementary nucleotide sequence comprising a sequence complementary to one or more polymorphic sequences selected from the group consisting of SEQ ID NOS:1-1468, wherein said polymorphic sequence includes the complement of the nucleotide listed in Table 1, column 5; and
d) a nucleotide sequence that is a fragment of said complementary sequence, provided that the fragment includes a polymorphic site in said polymorphic sequence.

16. The oligonucleotide of claim 15, wherein the oligonucleotide is between about 10 and about 51 bases in length.

17. The oligonucleotide of claim 15, wherein the oligonucleotide is between about 10 and about 40 bases in length.

18. The oligonucleotide of claim 15, wherein the oligonucleotide is between about 15 and about 30 bases in length.

19. A method of detecting a polymorphic site in a nucleic acid, the method comprising:
a) contacting said nucleic acid with an oligonucleotide that hybridizes to a polymorphic sequence selected from the group consisting of SEQ ID NOS: 1-1468, or its complement, provided that the polymorphic sequence includes a nucleotide other than the nucleotide recited in Table 1, column 5 for said polymorphic sequence, or the complement includes a nucleotide other than the complement of the nucleotide recited in Table 1, column 5; and
b) determining whether said nucleic acid and said oligonucleotide hybridize;
whereby hybridization of said oligonucleotide to said nucleic acid sequence indicates the presence of the polymorphic site in said nucleic acid.

20. The method of claim 19, wherein said oligonucleotide does not hybridize to said polymorphic sequence when said polymorphic sequence includes the nucleotide recited in Table 1, column 5 for said polymorphic sequence, or when the complement of the polymorphic sequence includes the complement of the nucleotide recited in Table 1, column 5 for said polymorphic sequence.

21. The method of claim 19, wherein said oligonucleotide is between about 10 and about 51 bases in length.

22. The method of claim 19, wherein said oligonucleotide is between about 10 and about 40 bases in length.

23. A method of detecting the presence of a sequence polymorphism in a subject, the method comprising:
a) providing a nucleic acid from said subject;
b) contacting said nucleic acid with an oligonucleotide that hybridizes to a polymorphic sequence selected from the group consisting of SEQ ID NOS: 1-1468, or its complement, provided that the polymorphic sequence includes a nucleotide other than the nucleotide recited in Table 1, column 5 for said polymorphic sequence, or the complement includes a nucleotide other than the complement of the nucleotide recited in Table 1, column 5; and
c) determining whether said nucleic acid and said oligonucleotide hybridize;
whereby hybridization of said oligonucleotide to said nucleic acid sequence indicates the presence of the polymorphism in said subject.

24. A method of determining the relatedness of a first and second nucleic acid, the method comprising:
a) providing a first nucleic acid and a second nucleic acid;
b) contacting said first nucleic acid and said second nucleic acid with an oligonucleotide that hybridizes to a polymorphic sequence selected from the group consisting of SEQ ID NOS: 1-1468, or its complement, provided that the polymorphic sequence includes a nucleotide other than the nucleotide recited in Table 1, column 5 for said polymorphic sequence, or the complement includes a nucleotide other than the complement of the nucleotide recited in Table 1, column 5;
c) determining whether said first nucleic acid and said second nucleic acid hybridize to said oligonucleotide; and
d) comparing hybridization of said first and second nucleic acids to said oligonucleotide, wherein hybridization of first and second nucleic acids to said nucleic acid indicates the first and second subjects are related.

25. The method of claim 24, wherein said oligonucleotide does not hybridize to said polymorphic sequence when said polymorphic sequence includes the nucleotide recited in Table 1, column 5 for said polymorphic sequence, or when the complement of the polymorphic sequence includes the complement of the nucleotide recited in Table 1, column 5 for said polymorphic sequence.

26. The method of claim 24, wherein the oligonucleotide is between about 10 and about 51 bases in length.

27. The method of claim 24, wherein the oligonucleotide is between about 10 and about 40 bases in length.

28. The method of claim 24, wherein the oligonucleotide is between about 15 and about 30 bases in length.

29. An isolated polypeptide comprising a polymorphic site at one or more amino acid residues, wherein the protein is encoded by a polynucleotide selected from the group consisting of polymorphic sequences SEQ ID NOS:1-1468, or their complement, provided that the polymorphic sequence includes a nucleotide other than the nucleotide recited in Table 1, column 5 for said polymorphic sequence, or the complement includes a nucleotide other than the complement of the nucleotide recited in Table 1, column 5.

30. The polypeptide of claim 29, wherein said polypeptide is translated in the same open reading frame as is a wild type protein whose amino acid sequence is identical to the amino acid sequence of the polymorphic protein except at the site of the polymorphism.

31. The polypeptide of claim 29, wherein the polypeptide encoded by said polymorphic sequence, or its complement, includes the nucleotide listed in Table 1, column 6 for said polymorphic sequence, or the complement includes the complement of the nucleotide listed in Table 1, column 6.

32. An antibody that binds specifically to a polypeptide encoded by a polynucleotide comprising a nucleotide sequence selected from the group consisting of polymorphic sequences SEQ ID NOS:1-1468, or its complement, provided that the polymorphic sequence includes a nucleotide other than the nucleotide recited in Table 1, column 5 for said polymorphic sequence, or the complement includes a nucleotide other than the complement of the nucleotide recited in Table 1, column 5.

33. The antibody of claim 32, wherein said antibody binds specifically to a polypeptide encoded by a polymorphic sequence which includes the nucleotide listed in Table 1, column 6 for said polymorphic sequence.

34. The antibody of claim 32, wherein said antibody does not bind specifically to a polypeptide encoded by a polymorphic sequence which includes the nucleotide listed in Table 1, column 5 for said polymorphic sequence.

35. A method of detecting the presence of a polypeptide having one or more amino acid residue polymorphisms in a subject, the method comprising
a) providing a protein sample from said subject;
b) contacting said sample with the antibody of claim 34 under conditions that allow for the formation of antibody-antigen complexes; and
c) detecting said antibody-antigen complexes,
whereby the presence of said complexes indicates the presence of said polypeptide.

36. A method of treating a subject suffering from, at risk for, or suspected of, suffering from a pathology ascribed to the presence of a sequence polymorphism in a subject, the method comprising:
a) providing a subject suffering from a pathology associated with aberrant expression of a first nucleic acid comprising a polymorphic sequence selected from the group consisting of SEQ ID NOS:1-1468, or its complement; and
b) administering to the subject an effective therapeutic dose of a second nucleic acid comprising the polymorphic sequence, provided that the second nucleic acid comprises the nucleotide present in the wild type allele,
thereby treating said subject.

37. The method of claim 36, wherein the second nucleic acid sequence comprises a polymorphic sequence which includes the nucleotide listed in Table 1, column 5 for said polymorphic sequence.

38. A method of treating a subject suffering from, at risk for, or suspected of, suffering from a pathology ascribed to the presence of a sequence polymorphism in a subject, the method comprising:
a) providing a subject suffering from a pathology associated with aberrant expression of a polymorphic sequence selected from the group consisting of polymorphic sequences SEQ ID NOS:1-1468, or its complement; and
b) administering to the subject an effective therapeutic dose of a polypeptide,
wherein said polypeptide is encoded by a polynucleotide comprising a polymorphic sequence selected from the group consisting of SEQ ID NOS:1-1468, or by a polynucleotide comprising a nucleotide sequence that is complementary to any one of polymorphic sequences SEQ ID NOS:1-1468, provided that said polymorphic sequence includes the nucleotide listed in Table 1, column 6 for said polymorphic sequence.

39. A method of treating a subject suffering from, at risk for, or suspected of suffering from, a pathology ascribed to the presence of a sequence polymorphism in a subject, the method comprising:
a) providing a subject suffering from, at risk for, or suspected of suffering from, a pathology associated with aberrant expression of a first nucleic acid comprising a polymorphic sequence selected from the group consisting of SEQ ID NOS:1-1468, or its complement; and
b) administering to the subject an effective dose of the antibody of claim 34,
thereby treating said subject.

40. A method of treating a subject suffering from, at risk for, or suspected of suffering from, a pathology ascribed to the presence of a sequence polymorphism in a subject, the method comprising:
a) providing a subject suffering from, at risk for, or suspected of suffering from, a pathology associated with aberrant expression of a nucleic acid comprising a polymorphic sequence selected from the group consisting of SEQ ID NOS:1-1468, or its complement; and
b) administering to the subject an effective dose of an oligonucleotide comprising a polymorphic sequence selected from the group consisting of SEQ ID NOS:1-1468, or by a polynucleotide comprising a nucleotide sequence that is complementary to any one of polymorphic sequences SEQ ID NOS:1-1468, provided that said polymorphic sequence includes the nucleotide listed in Table 1, column 5 or Table 1, column 6 for said polymorphic sequence,
thereby treating said subject.

41. An oligonucleotide array, comprising one or more oligonucleotides hybridizing to a first polynucleotide at a polymorphic site encompassed therein, wherein the first polynucleotide is chosen from the group consisting of:
a) a nucleotide sequence comprising one or more polymorphic sequences selected from the group consisting of SEQ ID NOS:1-1468;
b) a nucleotide sequence that is a fragment of any of said nucleotide sequence, provided that the fragment includes a polymorphic site in said polymorphic sequence;
c) a complementary nucleotide sequence comprising a sequence complementary to one or more polymorphic sequences selected from the group consisting of SEQ ID NOS:1-1468; and
d) a nucleotide sequence that is a fragment of said complementary sequence, provided that the fragment includes a polymorphic site in said polymorphic sequence.

42. The array of claim 41, wherein said array comprises about 10 oligonucleotides.

43. The array of claim 41, wherein said array comprises about 100 oligonucleotides.

44. The array of claim 41, wherein said array comprises about 1000 oligonucleotides.

The application's sequence listing, which the Patent Office published only in electronic form, follows.

SEQUENCE LISTING (1468 sequences)

SEQ ID NO: 1 - DNA, 51 bp, Homo sapiens
  allele (26)...(0): single nucleotide polymorphism
  misc_feature (0)...(0): Accession number cg43921971
gggtttgtattggcgcaccaagatccccaacagccagtgtgtgtttcccat

SEQ ID NO: 2 - DNA, 51 bp, Homo sapiens
  allele (26)...(0): single nucleotide polymorphism
  misc_feature (0)...(0): Accession number cg43336508
ccaggctactagaatgtttcagtggtattcaatcaacccaaagatgtaatg

SEQ ID NO: 3 - DNA, 50 bp, Homo sapiens
  allele (26)...(0): single nucleotide polymorphism
  misc_feature (25)...(26): Nucleotide deleted between bases 25 and 26
  misc_feature (0)...(0): Accession number cg43314087
atgggtttttttgtttttgtttttgtttttttttaaaggcaaaggggtct

SEQ ID NO: 4 - DNA, 50 bp, Homo sapiens
  allele (26)...(0): single nucleotide polymorphism
  misc_feature (25)...(26): Nucleotide deleted between bases 25 and 26
  misc_feature (0)...(0): Accession number cg43314087
tttgtttttgtttttgtttttttttaaaggcaaaggggtctgaagagatg

SEQ ID NO: 5 - DNA, 50 bp, Homo sapiens
  allele (26)...(0): single nucleotide polymorphism
  misc_feature (25)...(26): Nucleotide deleted between bases 25 and 26
  misc_feature (0)...(0): Accession number cg43132502
catgaggtggcacgaggcaggagttgcgatgccacctgggggtcacattg

SEQ ID NO: 6 - DNA, 50 bp, Homo sapiens
  allele (26)...(0): single nucleotide polymorphism
  misc_feature (25)...(26): Nucleotide deleted between bases 25 and 26
  misc_feature (0)...(0): Accession number cg43988460
acataatttgtaccaaaaaaaaaaagaaaggaaagaaaggggtggcctga

SEQ ID NO: 7 - DNA, 51 bp, Homo sapiens
  allele (26)...(0): single nucleotide polymorphism
  misc_feature (0)...(0): Accession number cg43988460
taccaaaaaaaaaaaggaaaggaaaaaaaggggtggcctgacactggtggc

SEQ ID NO: 8 - DNA, 50 bp, Homo sapiens
  allele (26)...(0): single nucleotide polymorphism
  misc_feature (25)...(26): Nucleotide deleted between bases 25 and 26
  misc_feature (0)...(0): Accession number cg43982945
gacacatgtcaggctggggcagcagcactctgatcagcaccaggtcccga

SEQ ID NO: 9 - DNA, 50 bp, Homo sapiens
  allele (26)...(0): single nucleotide polymorphism
  misc_feature (25)...(26): Nucleotide deleted between bases 25 and 26
  misc_feature (0)...(0): Accession number cg43266931
gggcgctagcgggggtgcacggcggccggtaggccgccaggatctcggcg

SEQ ID NO: 10 - DNA, 50 bp, Homo sapiens
  allele (26)...(0): single nucleotide polymorphism
  misc_feature (25)...(26): Nucleotide deleted between bases 25 and 26
  misc_feature (0)...(0): Accession number cg43321451
gaaggcacacacacacacacacacaagcaaaagctaaatcatcacccgcg

SEQ ID NO: 11 - DNA, 51 bp, Homo sapiens
  allele (26)...(0): single nucleotide polymorphism
  misc_feature (0)...(0): Accession number cg43933757
tcatctccctgcaacctccgcctcccgggttcaagcgattcttgtgcctca

SEQ ID NO: 12 - DNA, 51 bp, Homo sapiens
  allele (26)...(0): single nucleotide polymorphism
  misc_feature (0)...(0): Accession number cg43933757
ccgcctcctgggttcaagcgattctcgtgcctcagcctcccaagcagctgg

SEQ ID NO: 13 - DNA, 51 bp, Homo sapiens
  allele (26)...(0): single nucleotide polymorphism
  misc_feature (0)...(0): Accession number cg43933757
tccaactcctgacctcaggtaatccacctgccttggcctcccaaagtgctg

SEQ ID NO: 14 - DNA, 50 bp, Homo sapiens
  allele (26)...(0): single nucleotide polymorphism
  misc_feature (25)...(26): Nucleotide deleted between bases 25 and 26
  misc_feature (0)...(0): Accession number cg42185571
cttagctctacgatttaaatccatggtccaagggggaaaacatattatat

SEQ ID NO: 15 - DNA, 50 bp, Homo sapiens
  allele (26)...(0): single nucleotide polymorphism
  misc_feature (25)...(26): Nucleotide deleted between bases 25 and 26
  misc_feature (0)...(0): Accession number cg42185571
taatatagatagtgttcagtagcagatagaatgaacataaactattagtt

SEQ ID NO: 16 - DNA, 51 bp, Homo sapiens
  allele (26)...(0): single nucleotide polymorphism
  misc_feature (0)...(0): Accession number cg43947909
gaattgtccagaagacttggctcagttggaggagctgatagacatggctgt

SEQ ID NO: 17 - DNA, 51 bp, Homo sapiens
  allele (26)...(0): single nucleotide polymorphism
  misc_feature (0)...(0): Accession number cg43143315
gtgtgtgtgtctgtgtgtgtgtgtcggtgtatgtgtgtgtgggttctaatg

SEQ ID NO: 18 - DNA, 51 bp, Homo sapiens
  allele (26)...(0): single nucleotide polymorphism
  misc_feature (0)...(0): Accession number cg43327428
agcaggctggcctatgtggtctaaggttcagcctgaaactcatagacactg

SEQ ID NO: 19 - DNA, 51 bp, Homo sapiens
  allele (26)...(0): single nucleotide polymorphism
  misc_feature (0)...(0): Accession number cg32296860
cagcactttgggaggccgaggcgggcggatcacccgaggtcaggagttcga

SEQ ID NO: 20 - DNA, 50 bp, Homo sapiens
  allele (26)...(0): single nucleotide polymorphism
  misc_feature (25)...(26): Nucleotide deleted between bases 25 and 26
  misc_feature (0)...(0): Accession number cg32296860
ttgggaggccgaggcgggtggatcaccgaggtcaggagttcgagaccagc

SEQ ID NO: 21 - DNA, 50 bp, Homo sapiens
  allele (26)...(0): single nucleotide polymorphism
  misc_feature (25)...(26): Nucleotide deleted between bases 25 and 26
  misc_feature (0)...(0): Accession number cg32296860
gggaggccgaggcgggtggatcaccgaggtcaggagttcgagaccagcct

SEQ ID NO: 22 - DNA, 51 bp, Homo sapiens
  allele (26)...(0): single nucleotide polymorphism
  misc_feature (0)...(0): Accession number cg32296860
cgggtggatcacccgaggtcaggagatcgagaccagcctggccaacatggt

SEQ ID NO: 23 - DNA, 51 bp, Homo sapiens
  allele (26)...(0): single nucleotide polymorphism
  misc_feature (0)...(0): Accession number cg32296860
caacatggtgaaaccctgtctctaccaaaaatacaaaaattagctgggtgc

SEQ ID NO: 24 - DNA, 51 bp, Homo sapiens
  allele (26)...(0): single nucleotide polymorphism
  misc_feature (0)...(0): Accession number cg43264442
ggggcgcgggtggagaagctgcggcggcgcggcccgtaggaaggtgctgtc

SEQ ID NO: 25 - DNA, 51 bp, Homo sapiens
  allele (26)...(0): single nucleotide polymorphism
  misc_feature (0)...(0): Accession number cg43264442
aggaaggtgctgtccgaacgatcggaataggagcggtccctgcgcttgctg

SEQ ID NO: 26 - DNA, 50 bp, Homo sapiens
  allele (26)...(0): single nucleotide polymorphism
  misc_feature (25)...(26): Nucleotide deleted between bases 25 and 26
  misc_feature (0)...(0): Accession number cg43998926
gaacccaagagccactgataactggacaatccaatgaaacagaggaagca

SEQ ID NO: 27 - DNA, 51 bp, Homo sapiens
  allele (26)...(0): single nucleotide polymorphism
  misc_feature (0)...(0): Accession number cg43998926
ctcaggctgagttgcctccagtcttgggaatgtcatcttatactggtactg

SEQ ID NO: 28 - DNA, 51 bp, Homo sapiens
  allele (26)...(0): single nucleotide polymorphism
  misc_feature (0)...(0): Accession number cg43941594
ggttataaaaatagataactcgcagggtcataaatatctacagttagtaga

SEQ ID NO: 29 - DNA, 51 bp, Homo sapiens
  allele (26)...(0): single nucleotide polymorphism
  misc_feature (0)...(0): Accession number cg43962927
gccactccctgctccctgcctgagcaccattcgcagtcttgtttcctgttt

SEQ ID NO: 30 - DNA, 51 bp, Homo sapiens
  allele (26)...(0): single nucleotide polymorphism
  misc_feature (0)...(0): Accession number cg43991661
cttgtttattatctatcatagacatgaagatgatcatagttaataccaatt

SEQ ID NO: 31 - DNA, 51 bp, Homo sapiens
  allele (26)...(0): single nucleotide polymorphism
  misc_feature (0)...(0): Accession number cg43991661
actgttttaggcccaatattgatatgttaaatgaaggtatcagagaatctt

SEQ ID NO: 32 - DNA, 51 bp, Homo sapiens
  allele (26)...(0): single nucleotide polymorphism
  misc_feature (0)...(0): Accession number cg43310449
ctaaagatttcatgtcttcagtggagctggcatactgtaattgctatgtgg

SEQ ID NO: 33 - DNA, 51 bp, Homo sapiens
  allele (26)...(0): single nucleotide polymorphism
  misc_feature (0)...(0): Accession number cg43310449
actggcatactgtaattgctatgtgaaacttaatataacctcaacagcagc

SEQ ID NO: 34 - DNA, 51 bp, Homo sapiens
  allele (26)...(0): single nucleotide polymorphism
  misc_feature (0)...(0): Accession number cg43984524
tcaatgaggctttctattaatttcccttaaaagcaatggttattattgaaa

SEQ ID NO: 35 - DNA, 51 bp, Homo sapiens
  allele (26)...(0): single nucleotide polymorphism
  misc_feature (0)...(0): Accession number cg43248101
ggccctgaatgttatgaaggtttgaagtcagcctacagataacaggattat

SEQ ID NO: 36 - DNA, 51 bp, Homo sapiens
  allele (26)...(0): single nucleotide polymorphism
  misc_feature (0)...(0): Accession number cg43974968
cagtggctcacgcctataatcccagaactttgggaggccaaggcaggagga

SEQ ID NO: 37 - DNA, 51 bp, Homo sapiens
  allele (26)...(0): single nucleotide polymorphism
  misc_feature (0)...(0): Accession number cg43074195
cagctgaaggagataattggtgtgagcagaagctgaaagcttctaatggag

SEQ ID NO: 38 - DNA, 51 bp, Homo sapiens
  allele (26)...(0): single nucleotide polymorphism
  misc_feature (0)...(0): Accession number cg43074195
attggtgtgaacagaagctgaaagcatctaatggagacactcctacacatg

SEQ ID NO: 39 - DNA, 51 bp, Homo sapiens
  allele (26)...(0): single nucleotide polymorphism
  misc_feature (0)...(0): Accession number cg43074195
aacagaagctgaaagcttctaatggggacactcctacacatgaagacttga

SEQ ID NO: 40 - DNA, 51 bp, Homo sapiens
  allele (26)...(0): single nucleotide polymorphism
  misc_feature (0)...(0): Accession number cg43074195
tgaaagcttctaatggagacactccaacacatgaagacttgaccaagaaca

SEQ ID NO: 41 - DNA, 50 bp, Homo sapiens
  allele (26)...(0): single nucleotide polymorphism
  misc_feature (25)...(26): Nucleotide deleted between bases 25 and 26
  misc_feature (0)...(0): Accession number cg43988092
tagcgatacaaatatatatatatattttatccaaaaatatgttttataca

SEQ ID NO: 42 - DNA, 51 bp, Homo sapiens
  allele (26)...(0): single nucleotide polymorphism
  misc_feature (0)...(0): Accession number cg43953517
aagttcttgtagtaggtagggggtattactagggatatctgtggcatgatt

SEQ ID NO: 43 - DNA, 51 bp, Homo sapiens
  allele (26)...(0): single nucleotide polymorphism
  misc_feature (0)...(0): Accession number cg43953517
tgtagtaggtagggggtactactagcgatatctgtggcatgattatgcatt

SEQ ID NO: 44 - DNA, 50 bp, Homo sapiens
  allele (26)...(0): single nucleotide polymorphism
  misc_feature (25)...(26): Nucleotide deleted between bases 25 and 26
  misc_feature (0)...(0): Accession number cg43953517
atatctgtggcatgattatgcattcgtagtattatttaattaatttgggg

SEQ ID NO: 45 - DNA, 51 bp, Homo sapiens
  allele (26)...(0): single nucleotide polymorphism
  misc_feature (0)...(0): Accession number cg43953517
gtagtattatttaattaatttgggggtcattttgcttccttttctttatgc

SEQ ID NO: 46 - DNA, 50 bp, Homo sapiens
  allele (26)...(0): single nucleotide polymorphism
  misc_feature (25)...(26): Nucleotide deleted between bases 25 and 26
  misc_feature (0)...(0): Accession number cg43953517
aattaatttggggttcattttgcttcttttctttatgcttagattatctt

SEQ ID NO: 47 - DNA, 50 bp, Homo sapiens
  allele (26)...(0): single nucleotide polymorphism
  misc_feature (25)...(26): Nucleotide deleted between bases 25 and 26
  misc_feature (0)...(0): Accession number cg43953517
attaatttggggttcattttgcttcttttctttatgcttagattatctta

SEQ ID NO: 48 - DNA, 51 bp, Homo sapiens
  allele (26)...(0): single nucleotide polymorphism
  misc_feature (0)...(0): Accession number cg43290087
cctaacctcttggtaacggtagtcccgagagttcgcagtgtcagtgaaatc

SEQ ID NO: 49 - DNA, 51 bp, Homo sapiens
  allele (26)...(0): single nucleotide polymorphism
  misc_feature (0)...(0): Accession number cg43294632
agtagagagtaggggtaaaagctgggcattgcaaaaggattggtttaagaa

SEQ ID NO: 50 - DNA, 50 bp, Homo sapiens
  allele (26)...(0): single nucleotide polymorphism
  misc_feature (25)...(26): Nucleotide deleted between bases 25 and 26
  misc_feature (0)...(0): Accession number cg43056971
gttatttgaaaaatacctattttttccaaagtgtgtaaaagattgttttg

SEQ ID NO: 51 - DNA, 51 bp, Homo sapiens
  allele (26)...(0): single nucleotide polymorphism
  misc_feature (0)...(0): Accession number cg43976227
ttcatgtgcaagctaagttattcctatggtcaatcctctccatcttctggt

SEQ ID NO: 52 - DNA, 51 bp, Homo sapiens
  allele (26)...(0): single nucleotide polymorphism
  misc_feature (0)...(0): Accession number cg43994600
ccttgttcccactctccttcatatctaagtcatcaaacatctgaatgagag

SEQ ID NO: 53 - DNA, 51 bp, Homo sapiens
  allele (26)...(0): single nucleotide polymorphism
  misc_feature (0)...(0): Accession number cg43925670
atgttcttgtatttttttcccatctctacagacataagtgagcctcactgg

SEQ ID NO: 54 - DNA, 51 bp, Homo sapiens
  allele (26)...(0): single nucleotide polymorphism
  misc_feature (0)...(0): Accession number cg43925670
tgtatttttttcccatctttacagatataagtgagcctcactggaaatttt

SEQ ID NO: 55 - DNA, 51 bp, Homo sapiens
  allele (26)...(0): single nucleotide polymorphism
  misc_feature (0)...(0): Accession number cg43925670
catctttacagacataagtgagccttactggaaattttttcaacagtagtc

SEQ ID NO: 56 - DNA, 51 bp, Homo sapiens
  allele (26)...(0): single nucleotide polymorphism
  misc_feature (0)...(0): Accession number cg43925670
tacagacataagtgagcctcactgggaattttttcaacagtagtccagatc

SEQ ID NO: 57 - DNA, 51 bp, Homo sapiens
  allele (26)...(0): single nucleotide polymorphism
  misc_feature (0)...(0): Accession number cg43925670
cataagtgagcctcactggaaatttcttcaacagtagtccagatcttgaga

SEQ ID NO: 58 - DNA, 51 bp, Homo sapiens
  allele (26)...(0): single nucleotide polymorphism
  misc_feature (0)...(0): Accession number cg43925670
ccagatcttgagatcttcagaaatgtaggaatcaatgcttatttgtgtgag

SEQ ID NO: 59 - DNA, 51 bp, Homo sapiens
  allele (26)...(0): single nucleotide polymorphism
  misc_feature (0)...(0): Accession number cg42489232
atttttagtagagacaaggttttgctatgttggccaggctggtctcgaact

SEQ ID NO: 60 - DNA, 51 bp, Homo sapiens
  allele (26)...(0): single nucleotide polymorphism
  misc_feature (0)...(0): Accession number cg42489232
gtagagacaaggttttgccatgttgcccaggctggtctcgaactcctgacc

SEQ ID NO: 61 - DNA, 51 bp, Homo sapiens
  allele (26)...(0): single nucleotide polymorphism
  misc_feature (0)...(0): Accession number cg42489232
tttgccatgttggccaggctggtcttgaactcctgacctcaagcgatccgc

SEQ ID NO: 62 - DNA, 50 bp, Homo sapiens
  allele (26)...(0): single nucleotide polymorphism
  misc_feature (25)...(26): Nucleotide deleted between bases 25 and 26
  misc_feature (0)...(0): Accession number cg43926168
gaagggctctccttcacggggactgaaaaaaaaaatcatgaaatcctaat

SEQ ID NO: 63 - DNA, 50 bp, Homo sapiens
  allele (26)...(0): single nucleotide polymorphism
  misc_feature (25)...(26): Nucleotide deleted between bases 25 and 26
  misc_feature (0)...(0): Accession number cg43926168
ccttcacggggactgaaaaaaaaaatcatgaaatcctaattttcattttc

SEQ ID NO: 64 - DNA, 51 bp, Homo sapiens
  allele (26)...(0): single nucleotide polymorphism
  misc_feature (0)...(0): Accession number cg43336163
agccgggaatgctgctgctgctgctactgctgctgctgctgctggggggat

SEQ ID NO: 65 - DNA, 51 bp, Homo sapiens
  allele (26)...(0): single nucleotide polymorphism
  misc_feature (0)...(0): Accession number cg43987164
agggcagcccctcagaagccttcccagcagatccggggaccccgttctggt

SEQ ID NO: 66 - DNA, 51 bp, Homo sapiens
  allele (26)...(0): single nucleotide polymorphism
  misc_feature (0)...(0): Accession number cg43119489
tttttcatcctatcaattgaatgtgccttgaaaaatccagcaagagcgggg

SEQ ID NO: 67 - DNA, 51 bp, Homo sapiens
  allele (26)...(0): single nucleotide polymorphism
  misc_feature (0)...(0): Accession number cg43957170
ctactaaaaatacaaaaaattagccaggcgtggtggcgcatgcctgtagtc

SEQ ID NO: 68 - DNA, 51 bp, Homo sapiens
  allele (26)...(0): single nucleotide polymorphism
  misc_feature (0)...(0): Accession number cg43957170
acaaaaaattagccgggcgtggtggtgcatgcctgtagtcccagctactcg

SEQ ID NO: 69 - DNA, 51 bp, Homo sapiens
  allele (26)...(0): single nucleotide polymorphism
  misc_feature (0)...(0): Accession number cg43957170
aaaattagccgggcgtggtggcgcacgcctgtagtcccagctactcgggag

SEQ ID NO: 70 - DNA, 50 bp, Homo sapiens
  allele (26)...(0): single nucleotide polymorphism
  misc_feature (25)...(26): Nucleotide deleted between bases 25 and 26
  misc_feature (0)...(0): Accession number cg38438124
actttgtgtatatgtgtgtgtgtgttgttgggggggggtgagtgtgtgcg

SEQ ID NO: 71 - DNA, 50 bp, Homo sapiens
  allele (26)...(0): single nucleotide polymorphism
  misc_feature (25)...(26): Nucleotide deleted between bases 25 and 26
  misc_feature (0)...(0): Accession number cg38438124
tttgtgtatatgtgtgtgtgtgtgtttgggggggggtgagtgtgtgcgcg

SEQ ID NO: 72 - DNA, 51 bp, Homo sapiens
  allele (26)...(0): single nucleotide polymorphism
  misc_feature (0)...(0): Accession number cg42923882
agtgggcagggaccctgggagcctcaattctcaatgccccaccctttacct

SEQ ID NO: 73 - DNA, 51 bp, Homo sapiens
  allele (26)...(0): single nucleotide polymorphism
  misc_feature (0)...(0): Accession number cg43948037
aaagttctcgaaatgcttcatccccaacaaagcaaatttcatgtccgtcag

SEQ ID NO: 74 - DNA, 51 bp, Homo sapiens
  allele (26)...(0): single nucleotide polymorphism
  misc_feature (0)...(0): Accession number cg43948037
ctgttgctttccctggggtgtccagactcaccaggggagtcagaatcttct

SEQ ID NO: 75 - DNA, 51 bp, Homo sapiens
  allele (26)...(0): single nucleotide polymorphism
  misc_feature (0)...(0): Accession number cg43948037
tccctggggtgtccaggctcaccagcggagtcagaatcttctggttctccc

SEQ ID NO: 76 - DNA, 51 bp, Homo sapiens
  allele (26)...(0): single nucleotide polymorphism
  misc_feature (0)...(0): Accession number cg43948037
tgtccaggctcaccaggggagtcaggatcttctggttctcccttttcatca

SEQ ID NO: 77 - DNA, 51 bp, Homo sapiens
  allele (26)...(0): single nucleotide polymorphism
  misc_feature (0)...(0): Accession number cg43948037
caccaggggagtcagaatcttctggctctcccttttcatcaagtcttctaa

SEQ ID NO: 78 - DNA, 51 bp, Homo sapiens
  allele (26)...(0): single nucleotide polymorphism
  misc_feature (0)...(0): Accession number cg42703622
tgtgggttgacagatttttaaaatacaatttagagtatttggggttttgtt

SEQ ID NO: 79 - DNA, 50 bp, Homo sapiens
  allele (26)...(0): single nucleotide polymorphism
  misc_feature (25)...(26): Nucleotide deleted between bases 25 and 26
  misc_feature (0)...(0): Accession number cg43336176
tgctgctgctgctgctgctggggggatcacagaccatttctttctttcgg

SEQ ID NO: 80 - DNA, 51 bp, Homo sapiens
  allele (26)...(0): single nucleotide polymorphism
  misc_feature (0)...(0): Accession number cg43982923
acgcaggggtccccgcggccgccgcaatgcagaaatacgagaaactggaaa

SEQ ID NO: 81 - DNA, 51 bp, Homo sapiens
  allele (26)...(0): single nucleotide polymorphism
  misc_feature (0)...(0): Accession number cg43265203
acattcaagctcggtgttgtttcacccgcgtgcgccccggctgcggcggtg

SEQ ID NO: 82 - DNA, 51 bp, Homo sapiens
  allele (26)...(0): single nucleotide polymorphism
  misc_feature (0)...(0): Accession number cg43966625
cgctgcccgcgcggggaccacaacccaagtcgcggccgccgcagccatgcg

SEQ ID NO: 83 - DNA, 51 bp, Homo sapiens
  allele (26)...(0): single nucleotide polymorphism
  misc_feature (0)...(0): Accession number cg44004317
caccacgatgcggaccccactgcccagctcgacctcctcgggagggggcgc

SEQ ID NO: 84 - DNA, 51 bp, Homo sapiens
  allele (26)...(0): single nucleotide polymorphism
  misc_feature (0)...(0): Accession number cg43925424
tcggcgcacagtcgctgctccgcgctcgcgcccggcggcgctccaggtgct

SEQ ID NO: 85 - DNA, 51 bp, Homo sapiens
  allele (26)...(0): single nucleotide polymorphism
  misc_feature (0)...(0): Accession number cg44002977
tagaggaccacagggtgcagagaggatgtcctgagggtccttcctaagagg

SEQ ID NO: 86 - DNA, 51 bp, Homo sapiens
  allele (26)...(0): single nucleotide polymorphism
  misc_feature (0)...(0): Accession number cg27803682
ttgagcctccaggcttctccttgacatcattcctctccttccttgctgcaa

SEQ ID NO: 87 - DNA, 51 bp, Homo sapiens
  allele (26)...(0): single nucleotide polymorphism
  misc_feature (0)...(0): Accession number cg43971768
gaactgcagtcatgcacagctggcggccagccaaaggcattttactgagca

SEQ ID NO: 88 - DNA, 51 bp, Homo sapiens
  allele (26)...(0): single nucleotide polymorphism
  misc_feature (0)...(0): Accession number cg43987181
aagcttagtactaaaaagtcaaaatatttttgcatgatagaggagtgtaaa

SEQ ID NO: 89 - DNA, 51 bp, Homo sapiens
  allele (26)...(0): single nucleotide polymorphism
  misc_feature (0)...(0): Accession number cg43263644
gccgggacagtgttgtacagtgtttcgggcatgcacgtgatactcacacag

SEQ ID NO: 90 - DNA, 51 bp, Homo sapiens
  allele (26)...(0): single nucleotide polymorphism
  misc_feature (0)...(0): Accession number cg44131079
cggtgatattacaaaacaatgaatttggaactattatagattgggcacctc

SEQ ID NO: 91 - DNA, 51 bp, Homo sapiens
  allele (26)...(0): single nucleotide polymorphism
  misc_feature (0)...(0): Accession number cg44031914
gcacaggggagtgagggcagggcgcccgcagggggcacgcagggagggccc

SEQ ID NO: 92 - DNA, 51 bp, Homo sapiens
  allele (26)...(0): single nucleotide polymorphism
  misc_feature (0)...(0): Accession number cg43932550
catcatagaactccttgtggatctcatagagctcaggcactttgaagaaga

SEQ ID NO: 93 - DNA, 51 bp, Homo sapiens
  allele (26)...(0): single nucleotide polymorphism
  misc_feature (0)...(0): Accession number cg43932550
gacaggacccattttctcatctccaggcccttttccaagtccagctcactc

SEQ ID NO: 94 - DNA, 51 bp, Homo sapiens
  allele (26)...(0): single nucleotide polymorphism
  misc_feature (0)...(0): Accession number cg43967268
acggagaaaggagcagctgaaagtgacctggactccagccctggctgttgt

SEQ ID NO: 95 - DNA, 50 bp, Homo sapiens
  allele (26)...(0): single nucleotide polymorphism
  misc_feature (25)...(26): Nucleotide deleted between bases 25 and 26
  misc_feature (0)...(0): Accession number cg43920534
cgtcactatgtacttggttttgcgctttttttccttaaaaaaaaaaggcc

SEQ ID NO: 96 - DNA, 50 bp, Homo sapiens
  allele (26)...(0): single nucleotide polymorphism
  misc_feature (25)...(26): Nucleotide deleted between bases 25 and 26
  misc_feature (0)...(0): Accession number cg43920534
cttcataaaaccaatcgagagagagggacttaaaatcctgcttaccaaaa

SEQ ID NO: 97 - DNA, 51 bp, Homo sapiens
  allele (26)...(0): single nucleotide polymorphism
  misc_feature (0)...(0): Accession number cg43926887
attgttttcaacatgaagtaaagaaaaacgttgaggcctttactattagct

SEQ ID NO: 98 - DNA, 51 bp, Homo sapiens
  allele (26)...(0): single nucleotide polymorphism
  misc_feature (0)...(0): Accession number cg43926887
gtctaatactcctgggaggaaggaaaatatctatctagtaagaattttaat

SEQ ID NO: 99 - DNA, 51 bp, Homo sapiens
  allele (26)...(0): single nucleotide polymorphism
  misc_feature (0)...(0): Accession number cg43088901
gagcaccgtgtcaagctgctctgagtcacagtgggatgaaccagccggggc

SEQ ID NO: 100 - DNA, 50 bp, Homo sapiens
  allele (26)...(0): single nucleotide polymorphism
  misc_feature (25)...(26): Nucleotide deleted between bases 25 and 26
  misc_feature (0)...(0): Accession number cg43920213
gtgagccataatatgatggccagcagtggcgctgccttccacccatggtg

SEQ ID NO: 101 - DNA, 50 bp, Homo sapiens
  allele (26)...(0): single nucleotide polymorphism
  misc_feature (25)...(26): Nucleotide deleted between bases 25 and 26
  misc_feature (0)...(0): Accession number cg43969348
tgggggaaatgggcctcttgggggttcactgcacggcttgttcattggca

SEQ ID NO: 102 - DNA, 50 bp, Homo sapiens
  allele (26)...(0): single nucleotide polymorphism
  misc_feature (25)...(26): Nucleotide deleted between bases 25 and 26
  misc_feature (0)...(0): Accession number cg43966692
tacgaattggcatatttgtttattttcagtttgtgaaaatgtccttaatt

SEQ ID NO: 103 - DNA, 51 bp, Homo sapiens
  allele (26)...(0): single nucleotide polymorphism
  misc_feature (0)...(0): Accession number cg43265754
cgagaccagcctggccaacatggtgcaaccccatctctactaaaaatacaa

SEQ ID NO: 104 - DNA, 51 bp, Homo sapiens
  allele (26)...(0): single nucleotide polymorphism
  misc_feature (0)...(0): Accession number cg43265754
ccaacatggtgaaaccccatctctattaaaaatacaaaaattagccgggcg

SEQ ID NO: 105 - DNA, 51 bp, Homo sapiens
  allele (26)...(0): single nucleotide polymorphism
  misc_feature (0)...(0): Accession number cg43922227
atgttgtgttgggtccccagattcctatttgattttcttgcatcattttct

SEQ ID NO: 106 - DNA, 50 bp, Homo sapiens
  allele (26)...(0): single nucleotide polymorphism
  misc_feature (25)...(26): Nucleotide deleted between bases 25 and 26
  misc_feature (0)...(0): Accession number cg43927549
gtaagcagcacactaggaggcccagcgcaggcaaagagaagatggtgctg

SEQ ID NO: 107 - DNA, 51 bp, Homo sapiens
  allele (26)...(0): single nucleotide polymorphism
  misc_feature (0)...(0): Accession number cg43957486
tgtatcatagaaatgtaacttttgtgagacaaaggttttcctcttctattt

SEQ ID NO: 108 - DNA, 50 bp, Homo sapiens
  allele (26)...(0): single nucleotide polymorphism
  misc_feature (25)...(26): Nucleotide deleted between bases 25 and 26
  misc_feature (0)...(0): Accession number cg43973080
gacactaggaatttcttaaaaagaagatgttggaagcagaacacttacta

SEQ ID NO: 109 - DNA, 51 bp, Homo sapiens
  allele (26)...(0): single nucleotide polymorphism
  misc_feature (0)...(0): Accession number cg42914441
ctctgacctgagtctttgttttaaggagtatttgtcttcctttgtctaatg

SEQ ID NO: 110 - DNA, 51 bp, Homo sapiens
  allele (26)...(0): single nucleotide polymorphism
  misc_feature (0)...(0): Accession number cg43942318
ggacaccctcggaccctcgaaaacgtctcaggagctatgaagacatgattg

SEQ ID NO: 111 - DNA, 51 bp, Homo sapiens
  allele (26)...(0): single nucleotide polymorphism
  misc_feature (0)...(0): Accession number cg43929933
caggccaggcctgtgtgtccacctggacaggcattctccttgttccagaaa

SEQ ID NO: 112 - DNA, 51 bp, Homo sapiens
  allele (26)...(0): single nucleotide polymorphism
  misc_feature (0)...(0): Accession number cg43929933
cgcagccccaagtgtcaacaaggggttcaataaggctttctgggagccact

SEQ ID NO: 113 - DNA, 50 bp, Homo sapiens
  allele (26)...(0): single nucleotide polymorphism
  misc_feature (25)...(26): Nucleotide deleted between bases 25 and 26
  misc_feature (0)...(0): Accession number cg43929933
ctggcagctggtgggatggaaggggaggtggaaaagggcagaggaaatgg

SEQ ID NO: 114 - DNA, 51 bp, Homo sapiens
  allele (26)...(0): single nucleotide polymorphism
  misc_feature (0)...(0): Accession number cg43070037
aggtcaggagtttgagaccagcctaaccaacatggtgaaaccccatctcta

SEQ ID NO: 115 - DNA, 51 bp, Homo sapiens
  allele (26)...(0): single nucleotide polymorphism
  misc_feature (0)...(0): Accession number cg43070037
ggtcaggagtttgagaccagcctaggcaacatggtgaaaccccatctctac

SEQ ID NO: 116 - DNA, 51 bp, Homo sapiens
  allele (26)...(0): single nucleotide polymorphism
  misc_feature (0)...(0): Accession number cg43070037
gtgggtgcctgtaatcccagctacttgggaggctgaggcaggagaatcacc

SEQ ID NO: 117 - DNA, 51 bp, Homo sapiens
  allele (26)...(0): single nucleotide polymorphism
  misc_feature (0)...(0): Accession number cg43070037
atcccagctactcgggaggctgaggtaggagaatcacctgaacctaggagg

SEQ ID NO: 118 - DNA, 51 bp, Homo sapiens
  allele (26)...(0): single nucleotide polymorphism
  misc_feature (0)...(0): Accession number cg43070037
tcccagctactcgggaggctgaggcgggagaatcacctgaacctaggaggc

SEQ ID NO: 119 - DNA, 51 bp, Homo sapiens
  allele (26)...(0): single nucleotide polymorphism
  misc_feature (0)...(0): Accession number cg43123664
agtacgccagcccgggggcgccccgcatgtacatgttccacgcgggattcc

SEQ ID NO: 120 - DNA, 42 bp, Homo sapiens
  allele (17)...(0): single nucleotide polymorphism
  misc_feature (0)...(0): Accession number cg21428405
  misc_feature (1): Wherein n is a or t or c or g.
nacgcgttggcgtcgtcctcgttgagctcatcaatccaccac

SEQ ID NO: 121 - DNA, 51 bp, Homo sapiens
  allele (26)...(0): single nucleotide polymorphism
  misc_feature (0)...(0): Accession number cg43982633
acacagccccagtttgctttacagcgcaagttacaaactgtccctttaaaa

SEQ ID NO: 122 - DNA, 50 bp, Homo sapiens
  allele (26)...(0): single nucleotide polymorphism
  misc_feature (25)...(26): Nucleotide deleted between bases 25 and 26
  misc_feature (0)...(0): Accession number cg43054268
tctagatatttaactgacccactatttcctcaaggatactgcatttggac

SEQ ID NO: 123 - DNA, 50 bp, Homo sapiens
  allele (26)...(0): single nucleotide polymorphism
  misc_feature (25)...(26): Nucleotide deleted between bases 25 and 26
  misc_feature (0)...(0): Accession number cg43054268
gactatatgatcaaagccttatagcaaaaaaattttttaatatttgcaaa

SEQ ID NO: 124 - DNA, 51 bp, Homo sapiens
  allele (26)...(0): single nucleotide polymorphism
  misc_feature (0)...(0): Accession number cg43943775
tgaagattacccccacacctgtgtggcaagtgatcaaaaaggaacaggacc

SEQ ID NO: 125 - DNA, 50 bp, Homo sapiens
  allele (26)...(0): single nucleotide polymorphism
  misc_feature (25)...(26): Nucleotide deleted between bases 25 and 26
  misc_feature (0)...(0): Accession number cg42886565
ggcaacaaaagcgaaactccatctcaaaaaaaagagctataggatcttta

SEQ ID NO: 126 - DNA, 50 bp, Homo sapiens
  allele (26)...(0): single nucleotide polymorphism
  misc_feature (25)...(26): Nucleotide deleted between bases 25 and 26
  misc_feature (0)...(0): Accession number cg42886565
aagcgaaactccatctcaaaaaaaagagctataggatctttacaatatat

SEQ ID NO: 127 - DNA, 51 bp, Homo sapiens
  allele (26)...(0): single nucleotide polymorphism
  misc_feature (0)...(0): Accession number cg42886565
tcctctgtctgctggctggccgcgtatatgaagaagactaattggacacag

SEQ ID NO: 128 - DNA, 51 bp, Homo sapiens
  allele (26)...(0): single nucleotide polymorphism
  misc_feature (0)...(0): Accession number cg42886565
gcgtgtatgaagaagactaattggatacagagccgtgatgaattaaagtct

SEQ ID NO: 129 - DNA, 51 bp, Homo sapiens
  allele (26)...(0): single nucleotide polymorphism
  misc_feature (0)...(0): Accession number cg43307001
gcctcccgggttcaagtgattctcccgcctcagcctcccagtagctgggat

SEQ ID NO: 130 - DNA, 51 bp, Homo sapiens
  allele (26)...(0): single nucleotide polymorphism
  misc_feature (0)...(0): Accession number cg43307001
ggggtttcaccatgttggccaggctagtctcgaactcctgacctcaagtga

SEQ ID NO: 131 - DNA, 51 bp, Homo sapiens
  allele (26)...(0): single nucleotide polymorphism
  misc_feature (0)...(0): Accession number cg43307001
atgttggccaggctggtctcgaacttctgacctcaagtgatccgcccacct

SEQ ID NO: 132 - DNA, 51 bp, Homo sapiens
  allele (26)...(0): single nucleotide polymorphism
  misc_feature (0)...(0): Accession number cg43047341
ggtggatcacctgaggtcacgagtttgagaccagcctgaccaacatggaga

SEQ ID NO: 133 - DNA, 50 bp, Homo sapiens
  allele (26)...(0): single nucleotide polymorphism
  misc_feature (25)...(26): Nucleotide deleted between bases 25 and 26
  misc_feature (0)...(0): Accession number cg43965652
tccatttctttttcttttttttttttaagtgagactacattggcaaatgg

SEQ ID NO: 134 - DNA, 50 bp, Homo sapiens
  allele (26)...(0): single nucleotide polymorphism
  misc_feature (25)...(26): Nucleotide deleted between bases 25 and 26
  misc_feature (0)...(0): Accession number cg43965652
ccatttctttttcttttttttttttaagtgagactacattggcaaatggg

SEQ ID NO: 135 - DNA, 50 bp, Homo sapiens
  allele (26)...(0): single nucleotide polymorphism
  misc_feature (25)...(26): Nucleotide deleted between bases 25 and 26
  misc_feature (0)...(0): Accession number cg43965652
ttccaaacatcaaatgaagggggataatggttaccactatcgttttcaac

SEQ ID NO: 136 - DNA, 51 bp, Homo sapiens
  allele (26)...(0): single nucleotide polymorphism
  misc_feature (0)...(0): Accession number cg43985709
agctcactttggcccttctccacccgtcccaaccccattgctaacaacatg

SEQ ID NO: 137 - DNA, 50 bp, Homo sapiens
  allele (26)...(0): single nucleotide polymorphism
  misc_feature (25)...(26): Nucleotide deleted between bases 25 and 26
  misc_feature (0)...(0): Accession number cg44027791
gccacagggctcctttccaccagggcccagggaggacacaggtgggggac

SEQ ID NO: 138 - DNA, 51 bp, Homo sapiens
  allele (26)...(0): single nucleotide polymorphism
  misc_feature (0)...(0): Accession number cg44027791
tcttcagggcctcccgccgcagttgaccttacaagttcttcgtgaccaggt

SEQ ID NO: 139 - DNA, 51 bp, Homo sapiens
  allele (26)...(0): single nucleotide polymorphism
  misc_feature (0)...(0): Accession number cg44027791
aagggttcccacgcgtcctggtttaaaacgtctcattgggcacggccagtg

SEQ ID NO: 140 - DNA, 50 bp, Homo sapiens
  allele (26)...(0): single nucleotide polymorphism
  misc_feature (25)...(26): Nucleotide deleted between bases 25 and 26
  misc_feature (0)...(0): Accession number cg44027791
gtcctggtttagaacgtctcattggcacggccagtgtccacagtctgggc

SEQ ID NO: 141 - DNA, 50 bp, Homo sapiens
  allele (26)...(0): single nucleotide polymorphism
  misc_feature (25)...(26): Nucleotide deleted between bases 25 and 26
  misc_feature (0)...(0): Accession number cg43984418
tatgcaatgttcagcattttttttttcacagcactagagaccctgttaaa

SEQ ID NO: 142 - DNA, 51 bp, Homo sapiens
  allele (26)...(0): single nucleotide polymorphism
  misc_feature (0)...(0): Accession number cg43984418
catttttttttttcacagcactagaaaccctgttaaataggggatatgagt

SEQ ID NO: 143 - DNA, 50 bp, Homo sapiens
  allele (26)...(0): single nucleotide polymorphism
  misc_feature (25)...(26): Nucleotide deleted between bases 25 and 26
  misc_feature (0)...(0): Accession number cg43945210
cagacagacacaaggttctttttttgtttgttttgtttttcctcgccaac

SEQ ID NO: 144 - DNA, 50 bp, Homo sapiens
  allele (26)...(0): single nucleotide polymorphism
  misc_feature (25)...(26): Nucleotide deleted between bases 25 and 26
  misc_feature (0)...(0): Accession number cg43917396
taggggctgaaacgcagtcggggccggcactgcccaggaagggactccgg

SEQ ID NO: 145 - DNA, 51 bp, Homo sapiens
  allele (26)...(0): single nucleotide polymorphism
  misc_feature (0)...(0): Accession number cg43949162
tagacaataccatctctaggaacacgctgtcactcacacatggatgtgttg

SEQ ID NO: 146 - DNA, 50 bp, Homo sapiens
  allele (26)...(0): single nucleotide polymorphism
  misc_feature (25)...(26): Nucleotide deleted between bases 25 and 26
  misc_feature (0)...(0): Accession number cg41653463
tgtgcgtgcgtgtgtgtgtgtgtgttgtatcgtgtgtgtgtgttttgttt

SEQ ID NO: 147 - DNA, 50 bp, Homo sapiens
  allele (26)...(0): single nucleotide polymorphism
  misc_feature (25)...(26): Nucleotide deleted between bases 25 and 26
  misc_feature (0)...(0): Accession number cg41653463
gtgcgtgcgtgtgtgtgtgtgtgtggtatcgtgtgtgtgtgttttgtttt

SEQ ID NO: 148 - DNA, 51 bp, Homo sapiens
  allele (26)...(0): single nucleotide polymorphism
  misc_feature (0)...(0): Accession number cg43285429
cccagtcaagataaggaggatcccaacagctcccctccgaggttgggctct

SEQ ID NO: 149 - DNA, 51 bp, Homo sapiens
  allele (26)...(0): single nucleotide polymorphism
  misc_feature (0)...(0): Accession number cg43918636
agcagcagctgttggagtagaaccgagtccagggcgcgaccatcttcatcg

SEQ ID NO: 150 - DNA, 50 bp, Homo sapiens
  allele (26)...(0): single nucleotide polymorphism
  misc_feature (25)...(26): Nucleotide deleted between bases 25 and 26
  misc_feature (0)...(0): Accession number cg44005525
taagcagctctcttctgtgacagacaatcatgtaagaactgtgaaacccc

SEQ ID NO: 151 - DNA, 51 bp, Homo sapiens
  allele (26)...(0): single nucleotide polymorphism
  misc_feature (0)...(0): Accession number cg44005525
gacaaatcatgtaagaactgtgaaaacccagtttatgtagcgtatctcttg

SEQ ID NO: 152 - DNA, 51 bp, Homo sapiens
  allele (26)...(0): single nucleotide polymorphism
  misc_feature (0)...(0): Accession number cg40986905
atttttagtagagacggggtttcactgtgttagccaggatggtctcgatct

SEQ ID NO: 153 - DNA, 51 bp, Homo sapiens
  allele (26)...(0): single nucleotide polymorphism
  misc_feature (0)...(0): Accession number cg43303871
aataagggagaactactattttttttaagatctcaaaataattaataataa

SEQ ID NO: 154 - DNA, 51 bp, Homo sapiens; identical to SEQ ID NO: 153
  allele (26)...(0): single nucleotide polymorphism
  misc_feature (0)...(0): Accession number cg43303871

SEQ ID NO: 155 - DNA, 51 bp, Homo sapiens
  allele (26)...(0): single nucleotide polymorphism
  misc_feature (0)...(0): Accession number cg43918386
cttctaccccatgggtaaatgtattcacatattaccaagagaagaagcaca

SEQ ID NO: 156 - DNA, 51 bp, Homo sapiens
  allele (26)...(0): single nucleotide polymorphism
  misc_feature (0)...(0): Accession number cg43923712
aggaatcctggacaggagttttctgtagaggcgtttaaaaccctaccgaat

SEQ ID NO: 157 - DNA, 51 bp, Homo sapiens
  allele (26)...(0): single nucleotide polymorphism
  misc_feature (0)...(0): Accession number cg43936083
gctaactggtgacagttataaaaacgcaaaaaggagcctgggaaacagcaa

SEQ ID NO: 158 - DNA, 50 bp, Homo sapiens
  allele (26)...(0): single nucleotide polymorphism
  misc_feature (25)...(26): Nucleotide deleted between bases 25 and 26
  misc_feature (0)...(0): Accession number cg43936393
aaaaacaagtttcagtaaaaaaaaaactaaaacaaacactgaagtagagt

SEQ ID NO: 159 - DNA, 50 bp, Homo sapiens
  allele (26)...(0): single nucleotide polymorphism
  misc_feature (25)...(26): Nucleotide deleted between bases 25 and 26
  misc_feature (0)...(0): Accession number cg43936393
aaaacaagtttcagtaaaaaaaaaactaaaacaaacactgaagtagagtt

SEQ ID NO: 160 - DNA, 51 bp, Homo sapiens
  allele (26)...(0): single nucleotide polymorphism
  misc_feature (0)...(0): Accession number cg43940465
actgtattatttatttacatgggctaaaagcaaagaaaaatgagtcccttc

SEQ ID NO: 161 - DNA, 50 bp, Homo sapiens
  allele (26)...(0): single nucleotide polymorphism
  misc_feature (25)...(26): Nucleotide deleted between bases 25 and 26
  misc_feature (0)...(0): Accession number cg43940880
tagtttgtaagaactgtacaaaaaatgcttctggagatttctttggcaga

SEQ ID NO: 162 - DNA, 51 bp, Homo sapiens
  allele (26)...(0): single nucleotide polymorphism
  misc_feature (0)...(0): Accession number cg43950657
tttgggatcctgatcaattctttctaatgttgttgaaaatgacaaagttgg

SEQ ID NO: 163 - DNA, 51 bp, Homo sapiens
  allele (26)...(0): single nucleotide polymorphism
  misc_feature (0)...(0): Accession number cg43950657
cagctgccaaaaccgtgtgtgcaagggcgcgacctaaggggacattcttgt

SEQ ID NO: 164 - DNA, 50 bp, Homo sapiens
  allele (26)...(0): single nucleotide polymorphism
  misc_feature (25)...(26): Nucleotide deleted between bases 25 and 26
  misc_feature (0)...(0): Accession number cg43973740
tgaagcaaacaaacaaacaaaaaaaggagagcttcattagtagccaagat

SEQ ID NO: 165 - DNA, 51 bp, Homo sapiens
  allele (26)...(0): single nucleotide polymorphism
  misc_feature (0)...(0): Accession number cg43980521
gcgcatgggtccctccaggaaggctgggttagagtcccagggtggtcccca

SEQ ID NO: 166 - DNA, 51 bp, Homo sapiens
  allele (26)...(0): single nucleotide polymorphism
  misc_feature (0)...(0): Accession number cg43980521
ccctcagctttggggggtccttcctaaaggggcttcccttggcagaagggg

SEQ ID NO: 167 - DNA, 51 bp, Homo sapiens
  allele (26)...(0): single nucleotide polymorphism
  misc_feature (0)...(0): Accession number cg43980521
agcatcttgatctagaggactgaggacagccccatcaggctggggccctgg

SEQ ID NO: 168 - DNA, 51 bp, Homo sapiens
  allele (26)...(0): single nucleotide polymorphism
  misc_feature (0)...(0): Accession number cg44019839
agctacacagaggaaataacttaggcactttctgtttttttaaaaaaaata

SEQ ID NO: 169 - DNA, 51 bp, Homo sapiens
  allele (26)...(0): single nucleotide polymorphism
  misc_feature (0)...(0): Accession number cg44021891
agaagacctggcttccttacaacagagacaggctggtggctggggctagag

SEQ ID NO: 170 - DNA, 51 bp, Homo sapiens
  allele (26)...(0): single nucleotide polymorphism
  misc_feature (0)...(0): Accession number cg44021891
gcccccagctaggaccctgtagttgagaccgtggcatgatacaaggacctg

SEQ ID NO: 171 - DNA, 51 bp, Homo sapiens
  allele (26)...(0): single nucleotide polymorphism
  misc_feature (0)...(0): Accession number cg44921773
ttctgagacagggtcttgctctgtcacccaggctggagtgcaatggcacga

SEQ ID NO: 172 - DNA, 51 bp, Homo sapiens
  allele (26)...(0): single nucleotide polymorphism
  misc_feature (0)...(0): Accession number cg44921773
gggctcaagtgatcctcccacctcagcctcccgagtagctgagactacagg

SEQ ID NO: 173 - DNA, 51 bp, Homo sapiens
  allele (26)...(0): single nucleotide polymorphism
  misc_feature (0)...(0): Accession number cg43961485
ggtctcctcagtggtctattttaggggtggtttttttttttttttttactg

SEQ ID NO: 174 - DNA, 51 bp, Homo sapiens
  allele (26)...(0): single nucleotide polymorphism
  misc_feature (0)...(0): Accession number cg43985955
gagcacagatacagtttatgtaactagatggaagaaaatggaattactcca

SEQ ID NO: 175 - DNA, 51 bp, Homo sapiens
  allele (26)...(0): single nucleotide polymorphism
  misc_feature (0)...(0): Accession number cg44916647
gctcagcagcccctaggaagttaagtgagagctacagggcaggggggctcc

SEQ ID NO: 176 - DNA, 50 bp, Homo sapiens
  allele (26)...(0): single nucleotide polymorphism
  misc_feature (25)...(26): Nucleotide deleted between bases 25 and 26
  misc_feature (0)...(0): Accession number cg44916647
tctgtacatgtaacatgtggccatgccaggcatcccagcatctatcctga

SEQ ID NO: 177 - DNA, 51 bp, Homo sapiens
  allele (26)...(0): single nucleotide polymorphism
  misc_feature (0)...(0): Accession number cg44021459
ggtcactgtttcctcggcatcgtgccgcctggagagaactcccgaccggga

SEQ ID NO: 178 - DNA, 51 bp, Homo sapiens
  allele (26)...(0): single nucleotide polymorphism
  misc_feature (0)...(0): Accession number cg43926814
tagaattttctatccccccccatttttccagtaataaaaagtagtgctggg

SEQ ID NO: 179 - DNA, 51 bp, Homo sapiens
  allele (26)...(0): single nucleotide polymorphism
  misc_feature (0)...(0): Accession number cg43926814
gtagtgctgggatctggcacccagacttggtttttatcctgaccatttaca

SEQ ID NO: 180 - DNA, 51 bp, Homo sapiens
  allele (26)...(0): single nucleotide polymorphism
  misc_feature (0)...(0): Accession number cg43931431
agccatgtacgtgaaattgcttgggtacctgaactcccgctggaatttcta

SEQ ID NO: 181 - DNA, 51 bp, Homo sapiens
  allele (26)...(0): single nucleotide polymorphism
  misc_feature (0)...(0): Accession number cg44031765
atgcacctggcccacatggctgggcactgcagcctgcactccacttccagg

SEQ ID NO: 182 - DNA, 51 bp, Homo sapiens
  allele (26)...(0): single nucleotide polymorphism
  misc_feature (0)...(0): Accession number cg44031765
catctttataggccaccactgtgtgtttgctgcgccgggcacccacgaact

SEQ ID NO: 183 - DNA, 51 bp, Homo sapiens
  allele (26)...(0): single nucleotide polymorphism
  misc_feature (0)...(0): Accession number cg43970492
tgctttgttgcttcaagatgcatgcccatcctggctttagtgtccaagtat

SEQ ID NO: 184 - DNA, 51 bp, Homo sapiens
  allele (26)...(0): single nucleotide polymorphism
  misc_feature (0)...(0): Accession number cg42847874
acaaaaattagccgggcatggtggcacacgcctgtagtcccagctacttag

SEQ ID NO: 185 - DNA, 51 bp, Homo sapiens
  allele (26)...(0): single nucleotide polymorphism
  misc_feature (0)...(0): Accession number cg43951020
gagtgcagtggctcactgcaacctctgcctcccaggttcaagcaattctcc

SEQ ID NO: 186 - DNA, 51 bp, Homo sapiens
  allele (26)...(0): single nucleotide polymorphism
  misc_feature (0)...(0): Accession number cg43951020
caacctccgcctcccaggttcaagcgattctcctgcctcagcctccctagt

SEQ ID NO: 187 - DNA, 51 bp, Homo sapiens
  allele (26)...(0): single nucleotide polymorphism
  misc_feature (0)...(0): Accession number cg43971614
accattgctttggtcaattcaacctagggggaaaagagtcaaatatgtcca

SEQ ID NO: 188 - DNA, 51 bp, Homo sapiens
  allele (26)...(0): single nucleotide polymorphism
  misc_feature (0)...(0): Accession number cg43971614
ctctgcaccacagcaccgaggatagcacaaacccctcacgcgtctgcgtcc

SEQ ID NO: 189 - DNA, 50 bp, Homo sapiens
  allele (26)...(0): single nucleotide polymorphism
  misc_feature (25)...(26): Nucleotide deleted between bases 25 and 26
  misc_feature (0)...(0): Accession number cg43962954
cgggctccccatgcagccctagagagggagaagtccagtgtgctgttcca

SEQ ID NO: 190 - DNA, 51 bp, Homo sapiens
  allele (26)...(0): single nucleotide polymorphism
  misc_feature (0)...(0): Accession number cg43917689
aggcaacacctgtggaggaagggcatggggcaaaagctcacctcagaagtg

SEQ ID NO: 191 - DNA, 51 bp, Homo sapiens
  allele (26)...(0): single nucleotide polymorphism
  misc_feature (0)...(0): Accession number cg43916785
tcagatgactttacaaccaagggagcacacagggcaacaacaaattagagg

SEQ ID NO: 192 - DNA, 51 bp, Homo sapiens
  allele (26)...(0): single nucleotide polymorphism
  misc_feature (0)...(0): Accession number cg43287642
gcaacttattttaaaacccaaaggaaaaaggatggtactaccataaatcac

SEQ ID NO: 193 - DNA, 51 bp, Homo sapiens
  allele (26)...(0): single nucleotide polymorphism
  misc_feature (0)...(0): Accession number cg43986954
agtggaaacatttttgttcaatttccaggaattttctcttggggaaagtcg

SEQ ID NO: 194 - DNA, 51 bp, Homo sapiens
  allele (26)...(0): single nucleotide polymorphism
  misc_feature (0)...(0): Accession number cg42882543
tcccgagtagctgggattacaggcacgcgccaccacgcccagctaattttt

SEQ ID NO: 195 - DNA, 51 bp, Homo sapiens
  allele (26)...(0): single nucleotide polymorphism
  misc_feature (0)...(0): Accession number cg43062833
tgaaaagtattatggaaatcactgctgcacaggaaaagtaattcagatgtt

SEQ ID NO: 196 - DNA, 50 bp, Homo sapiens
  allele (26)...(0): single nucleotide polymorphism
  misc_feature (25)...(26): Nucleotide deleted between bases 25 and 26
  misc_feature (0)...(0): Accession number cg43959148
agactagtgtgggccttgggccccctcattttgacatccttccagatggt

SEQ ID NO: 197 - DNA, 50 bp, Homo sapiens
  allele (26)...(0): single nucleotide polymorphism
  misc_feature (25)...(26): Nucleotide deleted between bases 25 and 26
  misc_feature (0)...(0): Accession number cg43950766
gttcacatttagtgaacctgcatttatggggggggggggggtacacagta

SEQ ID NO: 198 - DNA, 51 bp, Homo sapiens
  allele (26)...(0): single nucleotide polymorphism
  misc_feature (0)...(0): Accession number cg43958860
tctgtcttttatttaacaaaaaatgcaattaactgtaaacttggaatcaag

SEQ ID NO: 199 - DNA, 51 bp, Homo sapiens
  allele (26)...(0): single nucleotide polymorphism
  misc_feature (0)...(0): Accession number cg43968205
ctatagcagagggggttatgggggcaggagggtagactgacatacagaagt

SEQ ID NO: 200 - DNA, 51 bp, Homo sapiens
  allele (26)...(0): single nucleotide polymorphism
  misc_feature (0)...(0): Accession number cg43950996
acgccagtccagaaagaaggtgctgaagcccctgctctgtcctctccatca

SEQ ID NO: 201 - DNA, 51 bp, Homo sapiens
  allele (26)...(0): single nucleotide polymorphism
  misc_feature (0)...(0): Accession number cg44924222
taagggtgagcagcagcaggagcgctttgaagaagaagtagaaggggatgt

SEQ ID NO: 202 - DNA, 51 bp, Homo sapiens
  allele (26)...(0): single nucleotide polymorphism
  misc_feature (0)...(0): Accession number cg44924222
atgtcaggcaccgtgcgcagactgcggtgactggtggcatacaggaccttg

SEQ ID NO: 203 - DNA, 51 bp, Homo sapiens
  allele (26)...(0): single nucleotide polymorphism
  misc_feature (0)...(0): Accession number cg44924222
gtaccggaaggcgtaggaggagacggtgaggatgagagtgaccacgtggtg

SEQ ID NO: 204 - DNA, 51 bp, Homo sapiens
  allele (26)...(0): single nucleotide polymorphism
  misc_feature (0)...(0): Accession number cg44916575
gaggacaaaaacagaaagccctgtgtgtgtgggaaaactccgctgcagaga

SEQ ID NO: 205 - DNA, 51 bp, Homo sapiens
  allele (26)...(0): single nucleotide polymorphism
  misc_feature (0)...(0): Accession number cg42650960
ggctggagtgcagtggcacgatctcagctcactgcaagcctccgcctcccg

SEQ ID NO: 206 - DNA, 51 bp, Homo sapiens
  allele (26)...(0): single nucleotide polymorphism
  misc_feature (0)...(0): Accession number cg43947129
ctgggggcgtccatggtgcggcggccagggcggtgagtcagccaaggagga

SEQ ID NO: 207 - DNA, 51 bp, Homo sapiens
  allele (26)...(0): single nucleotide polymorphism
  misc_feature (0)...(0): Accession number cg43922383
atctgaaaatggtgtgtggcgtcgcacgcgccagctatcgtcagtgccttt

SEQ ID NO: 208 - DNA, 51 bp, Homo sapiens
  allele (26)...(0): single nucleotide polymorphism
  misc_feature (0)...(0): Accession number cg43922383
cgcgcgccagctatcgtcagtgcctgttattgccattgggtttgtgactgt

SEQ ID NO: 209 - DNA, 50 bp, Homo sapiens
  allele (26)...(0): single nucleotide polymorphism
  misc_feature (25)...(26): Nucleotide deleted between bases 25 and 26
  misc_feature (0)...(0): Accession number cg43922383
tcagtgcctttattgccattgggttgtgactgttgatatagtgacgacct

SEQ ID NO: 210 - DNA, 51 bp, Homo sapiens
  allele (26)...(0): single nucleotide polymorphism
  misc_feature (0)...(0): Accession number cg43922383
attgccattgggtttgtgactgttggtatagtgacgacctcaggagcaaca

SEQ ID NO: 211 - DNA, 51 bp, Homo sapiens
  allele (26)...(0): single nucleotide polymorphism
  misc_feature (0)...(0): Accession number cg43922383
ttgtgactgttgatatagtgacgacgtcaggagcaacaggtgggttaaaaa

SEQ ID NO: 212 - DNA, 51 bp, Homo sapiens
  allele (26)...(0): single nucleotide polymorphism
  misc_feature (0)...(0): Accession number cg43953935
ctttttaaataaatgactgcgagtgggtgtaaattctgagaaaattacatt

SEQ ID NO: 213 - DNA, 50 bp, Homo sapiens
  allele (26)...(0): single nucleotide polymorphism
  misc_feature (25)...(26): Nucleotide deleted between bases 25 and 26
  misc_feature (0)...(0): Accession number cg43933591
acatttggaattttagcttttttttgcctctctactgtgtcactaaatat

SEQ ID NO: 214 - DNA, 51 bp, Homo sapiens
  allele (26)...(0): single nucleotide polymorphism
  misc_feature (0)...(0): Accession number cg43949875
ctgagtagctgggattacaggcgtgcgccaccatgcccagctaattttttg

SEQ ID NO: 215 - DNA, 51 bp, Homo sapiens
  allele (26)...(0): single nucleotide polymorphism
  misc_feature (0)...(0): Accession number cg43100840
ggacaggggtgcagctggcagccgaaaaaggggaccacctcggagggctgg

SEQ ID NO: 216 - DNA, 51 bp, Homo sapiens
  allele (26)...(0): single nucleotide polymorphism
  misc_feature (0)...(0): Accession number cg43922270
tgtatatgtgtacgtaggtagatgtatgcagcatgcggcaggtttgccagg

SEQ ID NO: 217 - DNA, 51 bp, Homo sapiens
  allele (26)...(0): single nucleotide polymorphism
  misc_feature (0)...(0): Accession number cg43993462
cagaatgagctgcagaggtttcctctctgctttacaatcccttattgaagt

SEQ ID NO: 218 - DNA, 51 bp, Homo sapiens
  allele (26)...(0): single nucleotide polymorphism
  misc_feature (0)...(0): Accession number cg43993462
taaacatctacagagttgaaacatactctgtcatattaaatatattatcta

SEQ ID NO: 219 - DNA, 50 bp, Homo sapiens
  allele (26)...(0): single nucleotide polymorphism
  misc_feature (25)...(26): Nucleotide deleted between bases 25 and 26
  misc_feature (0)...(0): Accession number cg43993462
tagtctcacttcttaccaaaaaaaacaatgaactggattcagcccactca

SEQ ID NO: 220 - DNA, 51 bp, Homo sapiens
  allele (26)...(0): single nucleotide polymorphism
  misc_feature (0)...(0): Accession number cg43329741
gcagtgcaggagatgacagagtgagaagggcccagagcagaattctggccc

SEQ ID NO: 221 - DNA, 51 bp, Homo sapiens
  allele (26)...(0): single nucleotide polymorphism
  misc_feature (0)...(0): Accession number cg42910688
aaacaatttttgttcaatgcccaccaagacatatagaattgggaactgata

SEQ ID NO: 222 - DNA, 50 bp, Homo sapiens
  allele (26)...(0): single nucleotide polymorphism
  misc_feature (25)...(26): Nucleotide deleted between bases 25 and 26
  misc_feature (0)...(0): Accession number cg43967474
tgctggggaccatggatggggaggagggcacagggcccagtgcagatgaa

SEQ ID NO: 223 - DNA, 51 bp, Homo sapiens
  allele (26)...(0): single nucleotide polymorphism
  misc_feature (0)...(0): Accession number cg43964140
gctgagatcttaggtcaaaaagctatagaaaagaaatcactttgaaaaaca

SEQ ID NO: 224 - DNA, 51 bp, Homo sapiens
  allele (26)...(0): single nucleotide polymorphism
  misc_feature (0)...(0): Accession number cg43990820
ccggtttaaaaggaaaagtaaaaaaaaatccacagttgagcagttgatgtg

SEQ ID NO: 225 - DNA, 51 bp, Homo sapiens
  allele (26)...(0): single nucleotide polymorphism
  misc_feature (0)...(0): Accession number cg43930377
tcacagctggattgaaagagtatttaggaaatgtggcaatgttgtttatat

SEQ ID NO: 226 - DNA, 51 bp, Homo sapiens
  allele (26)...(0): single nucleotide polymorphism
  misc_feature (0)...(0): Accession number cg43969800
gcaagacgtgtcaggggaaccaaggttcagatcattcccccttcatctaca

SEQ ID NO: 227 - DNA, 51 bp, Homo sapiens
  allele (26)...(0): single nucleotide polymorphism
  misc_feature (0)...(0): Accession number cg43973724
tataagtgtatgcaatagaaatttgtattttgtaatagaaaatttaccttg

SEQ ID NO: 228 - DNA, 50 bp, Homo sapiens
  allele (26)...(0): single nucleotide polymorphism
  misc_feature (25)...(26): Nucleotide deleted between bases 25 and 26
  misc_feature (0)...(0): Accession number cg43258867
ggcccagtcctggggctctgggaggtcacgctccctcctcaggctgggga

SEQ ID NO: 229 - DNA, 50 bp, Homo sapiens
  allele (26)...(0): single nucleotide polymorphism
  misc_feature (25)...(26): Nucleotide deleted between bases 25 and 26
  misc_feature (0)...(0): Accession number cg42907867
gacgatgtggacgctgggagggatctggcgttggttttctgaaagccagg

SEQ ID NO: 230 - DNA, 51 bp, Homo sapiens
  allele (26)...(0): single nucleotide polymorphism
  misc_feature (0)...(0): Accession number cg43920176
aaagctgctttgttaggttccttattttttattaactgtcttttctcagtt

SEQ ID NO: 231 - DNA, 51 bp, Homo sapiens
  allele (26)...(0): single nucleotide polymorphism
  misc_feature (0)...(0): Accession number cg43920176
attttgtcattttttacatcaactttatggtcttgtttttacatggtaatt

SEQ ID NO: 232 - DNA, 51 bp, Homo sapiens
  allele (26)...(0): single nucleotide polymorphism
  misc_feature (0)...(0): Accession number cg43950100
caaaattaacaaattcacaaaatacgacagctagaattacaaaatccattc

SEQ ID NO: 233 - DNA, 50 bp, Homo sapiens
  allele (26)...(0): single nucleotide polymorphism
  misc_feature (25)...(26): Nucleotide deleted between bases 25 and 26
  misc_feature (0)...(0): Accession number cg43950100
ggcacagggagaaaaacaaagtgttcaatcagtccaggcacagggactgg

SEQ ID NO: 234 - DNA, 51 bp, Homo sapiens
  allele (26)...(0): single nucleotide polymorphism
  misc_feature (0)...(0): Accession number cg43950100
acattgaccccttcagttcctatatacagcacccaatattcctttgaaata

SEQ ID NO: 235 - DNA, 51 bp, Homo sapiens
  allele (26)...(0): single nucleotide polymorphism
  misc_feature (0)...(0): Accession number cg43950100
caggtttagtgttgttgtagtggcatttgtccagaattggtacctccccat

SEQ ID NO: 236 - DNA, 50 bp, Homo sapiens
  allele (26)...(0): single nucleotide polymorphism
  misc_feature (25)...(26): Nucleotide deleted between bases 25 and 26
  misc_feature (0)...(0): Accession number cg43132640
ctctatgaactctgttttctttctatgagatattaaaccatgtaaagaac

SEQ ID NO: 237 - DNA, 50 bp, Homo sapiens
  allele (26)...(0): single nucleotide polymorphism
  misc_feature (25)...(26): Nucleotide deleted between bases 25 and 26
  misc_feature (0)...(0): Accession number cg44938448
tgaaagttagagagctgcaaatctctaagtatcaatgtaaagaagcagat

SEQ ID NO: 238 - DNA, 51 bp, Homo sapiens
  allele (26)...(0): single nucleotide polymorphism
  misc_feature (0)...(0): Accession number cg44938448
aatgccactttcagatggaagggaagtgagatggaaaacaacaaaaaagga

SEQ ID NO: 239 - DNA, 50 bp, Homo sapiens
  allele (26)...(0): single nucleotide polymorphism
  misc_feature (25)...(26): Nucleotide deleted between bases 25 and 26
  misc_feature (0)...(0): Accession number cg43949897
agcactttggagctggcctcgcccctaggaggagagggtccctcctgggt

SEQ ID NO: 240 - DNA, 51 bp, Homo sapiens
  allele (26)...(0): single nucleotide polymorphism
  misc_feature (0)...(0): Accession number cg42549778
gggggtgctcctggaagccccaagaccatccaggattgcctcccagctgcc

SEQ ID NO: 241 - DNA, 50 bp, Homo sapiens
  allele (26)...(0): single nucleotide polymorphism
  misc_feature (25)...(26): Nucleotide deleted between bases 25 and 26
  misc_feature (0)...(0): Accession number cg44028574
cagctcccagctaccatgatgagcctggcggcttgagcacagtgagtgct

SEQ ID NO: 242 - DNA, 51 bp, Homo sapiens
  allele (26)...(0): single nucleotide polymorphism
  misc_feature (0)...(0): Accession number cg44035718
tctcatctagtgctgaagtctgaggactctgcagcatcagacccacctcta

SEQ ID NO: 243 - DNA, 51 bp, Homo sapiens
  allele (26)...(0): single nucleotide polymorphism
  misc_feature (0)...(0): Accession number cg44035718
gaagagaaagataggtttaatttatctgaagttttcatggtgttaatattt

SEQ ID NO: 244 - DNA, 51 bp, Homo sapiens
  allele (26)...(0): single nucleotide polymorphism
  misc_feature (0)...(0): Accession number cg43963595
cccccgcagacagaggccggaggctgtctggtgcagcgatgtttaatggca

SEQ ID NO: 245 - DNA, 51 bp, Homo sapiens
  allele (26)...(0): single nucleotide polymorphism
  misc_feature (0)...(0): Accession number cg43963595
ccccgcagacagaggccggaggcttgctggtgcagcgatgtttaatggcaa

SEQ ID NO: 246 - DNA, 50 bp, Homo sapiens
  allele (26)...(0): single nucleotide polymorphism
  misc_feature (25)...(26): Nucleotide deleted between bases 25 and 26
  misc_feature (0)...(0): Accession number cg43963595
atgttacagtatgtacaagacccctccctcgggggacggggcggactccg

SEQ ID NO: 247 - DNA, 51 bp, Homo sapiens
  allele (26)...(0): single nucleotide polymorphism
  misc_feature (0)...(0): Accession number cg43992566
aaatagagaatccagacccttcccaaataatttaagaactgagttttcctc

SEQ ID NO: 248 - DNA, 50 bp, Homo sapiens
  allele (26)...(0): single nucleotide polymorphism
  misc_feature (25)...(26): Nucleotide deleted between bases 25 and 26
  misc_feature (0)...(0): Accession number cg43992566
atttaaatctgaagcagaaaaaaaagacaatttacaaagaattattgagc

SEQ ID NO: 249 - DNA, 51 bp, Homo sapiens
  allele (26)...(0): single nucleotide polymorphism
  misc_feature (0)...(0): Accession number cg43067745
tccctgcacgcctttacgtcagactatcaccacaagagccttgagtgtcca

SEQ ID NO: 250 - DNA, 51 bp, Homo sapiens
  allele (26)...(0): single nucleotide polymorphism
  misc_feature (0)...(0): Accession number cg42697161
acgtggtgctggtagtgtcttgttgggtgtgaattctctctcatacaaaag

SEQ ID NO: 251 - DNA, 51 bp, Homo sapiens
  allele (26)...(0): single nucleotide polymorphism
  misc_feature (0)...(0): Accession number cg43957889
gtgcaatggcatgatctcggctcactgcaacctctgcctcccgggttcaag

SEQ ID NO: 252 - DNA, 51 bp, Homo sapiens
  allele (26)...(0): single nucleotide polymorphism
  misc_feature (0)...(0): Accession number cg42391024
aactgcagacaaattttcaaattcaattctttacttctccaagatcttcga

SEQ ID NO: 253 - DNA, 51 bp, Homo sapiens
  allele (26)...(0): single nucleotide polymorphism
  misc_feature (0)...(0): Accession number cg43976566
ctttaatgaaacactttggatcgtcggtgctgaagtgaaaagaatgtgctg

SEQ ID NO: 254 - DNA, 51 bp, Homo sapiens
  allele (26)...(0): single nucleotide polymorphism
  misc_feature (0)...(0): Accession number cg44001900
gatgctaaaagcttctgcgaaatgtattcacgtttaatgttgggaaatccc

SEQ ID NO: 255 - DNA, 50 bp, Homo sapiens
  allele (26)...(0): single nucleotide polymorphism
  misc_feature (25)...(26): Nucleotide deleted between bases 25 and 26
  misc_feature (0)...(0): Accession number cg43954569
ttcagcccacatgactcagggacacctccccagcggttgctggaggcacc

SEQ ID NO: 256 - DNA, 51 bp, Homo sapiens
  allele (26)...(0): single nucleotide polymorphism
  misc_feature (0)...(0): Accession number cg43925519
agtggcccctttcccgccctgaagacgtttcacacgaaaaggccgtttgtt

SEQ ID NO: 257 - DNA, 51 bp, Homo sapiens
  allele (26)...(0): single nucleotide polymorphism
  misc_feature (0)...(0): Accession number cg43145684
tggcaaaactgccagcagcggttgctgaaaatgctgggttcggtgcctact

SEQ ID NO: 258 - DNA, 51 bp, Homo sapiens
  allele (26)...(0): single nucleotide polymorphism
  misc_feature (0)...(0): Accession number cg43981803
accagctcggagagggcacttgagatggtctatgaacaaatctgtctaaaa

SEQ ID NO: 259 - DNA, 51 bp, Homo sapiens
  allele (26)...(0): single nucleotide polymorphism
  misc_feature (0)...(0): Accession number cg44006111
aggcctgatgcacatgtgcacaggtgcctacatgctctgttcttgtcaaca

SEQ ID NO: 260 - DNA, 51 bp, Homo sapiens
  allele (26)...(0): single nucleotide polymorphism
  misc_feature (0)...(0): Accession number cg44924968
tggccagggacctgagcccgagacatccctgcatttgatccaaccaggtca

SEQ ID NO: 261 - DNA, 51 bp, Homo sapiens
  allele (26)...(0): single nucleotide polymorphism
  misc_feature (0)...(0): Accession number cg44924968
ggccagggacctgagcccgagacactcctgcatttgatccaaccaggtcag

SEQ ID NO: 262 - DNA, 51 bp, Homo sapiens
  allele (26)...(0): single nucleotide polymorphism
  misc_feature (0)...(0): Accession number cg43977021
ttgcatctaaagtaattcattaatgaacaggagtagatgaggcctggcaca

SEQ ID NO: 263 - DNA, 51 bp, Homo sapiens
  allele (26)...(0): single nucleotide polymorphism
  misc_feature (0)...(0): Accession number cg43977021
taaagtaattcattaatgtacaggaatagatgaggcctggcacacatagca

SEQ ID NO: 264 - DNA, 51 bp, Homo sapiens
  allele (26)...(0): single nucleotide polymorphism
  misc_feature (0)...(0): Accession number cg43977021
attaatgtacaggagtagatgaggcttggcacacatagcagaaggtaatgg

SEQ ID NO: 265 - DNA, 51 bp, Homo sapiens
  allele (26)...(0): single nucleotide polymorphism
  misc_feature (0)...(0): Accession number cg43977021
caggagtagatgaggcctggcacacgtagcagaaggtaatggttctatagg

SEQ ID NO: 266 - DNA, 51 bp, Homo sapiens
  allele (26)...(0): single nucleotide polymorphism
  misc_feature (0)...(0): Accession number cg43977021
atgaggcctggcacacatagcagaaagtaatggttctataggtgtatcttc

SEQ ID NO: 267 - DNA, 51 bp, Homo sapiens
  allele (26)...(0): single nucleotide polymorphism
  misc_feature (0)...(0): Accession number cg43977021
taatgcactttgggctagagaaatacaaaaatcacacgtaacaaaaacaaa

SEQ ID NO: 268 - DNA, 51 bp, Homo sapiens
  allele (26)...(0): single nucleotide polymorphism
  misc_feature (0)...(0): Accession number cg43999373
cacagaattcagaactttttcaccccgaactggagaaggagcactccgtca

SEQ ID NO: 269 - DNA, 51 bp, Homo sapiens
  allele (26)...(0): single nucleotide polymorphism
  misc_feature (0)...(0): Accession number cg43980889
tttgagagctgcagcagaagcggctttatcacagactggatttagttatga

SEQ ID NO: 270 - DNA, 51 bp, Homo sapiens
  allele (26)...(0): single nucleotide polymorphism
  misc_feature (0)...(0): Accession number cg43980889
ggctgtatcacagactggatttagtgatgatgaaaatactggactgtattt

SEQ ID NO: 271 - DNA, 50 bp, Homo sapiens
  allele (26)...(0): single nucleotide polymorphism
  misc_feature (25)...(26): Nucleotide deleted between bases 25 and 26
  misc_feature (0)...(0): Accession number cg44030196
tagattgttcagtactcagctcacccccataagaccatttctcctctgcg

SEQ ID NO: 272 - DNA, 51 bp, Homo sapiens
  allele (26)...(0): single nucleotide polymorphism
  misc_feature (0)...(0): Accession number cg40336929
ggcaacaagttacagcggcgggagaagttccttctctcacctgccgggggg

SEQ ID NO: 273 - DNA, 51 bp, Homo sapiens
  allele (26)...(0): single nucleotide polymorphism
  misc_feature (0)...(0): Accession number cg43920571
agaagacagcgcgcagaaatagtgcagagagaaatgaccagtactatttat

SEQ ID NO: 274 - DNA, 51 bp, Homo sapiens
  allele (26)...(0): single nucleotide polymorphism
  misc_feature (0)...(0): Accession number cg43958980
taagatcctccatcccaccaaaaatgacccacaatgactccaaatcttgtt

SEQ ID NO: 275 - DNA, 50 bp, Homo sapiens
  allele (26)...(0): single nucleotide polymorphism
  misc_feature (25)...(26): Nucleotide deleted between bases 25 and 26
  misc_feature (0)...(0): Accession number cg43320682
cattggcaacggctgcccactagggcactgccacttgcctggctcaaact

SEQ ID NO: 276 - DNA, 50 bp, Homo sapiens
  allele (26)...(0): single nucleotide polymorphism
  misc_feature (25)...(26): Nucleotide deleted between bases 25 and 26
  misc_feature (0)...(0): Accession number cg42708544
ccaggcttgcctctagattggctggccagaatttctggggtcagtctgaa

SEQ ID NO: 277 - DNA, 51 bp, Homo sapiens
  allele (26)...(0): single nucleotide polymorphism
  misc_feature (0)...(0): Accession number cg43949796
gggaagtaaaatgaaggaagcagacttcttgctcatctttccaaatgaaat

SEQ ID NO: 278 - DNA, 50 bp, Homo sapiens
  allele (26)...(0): single nucleotide polymorphism
  misc_feature (25)...(26): Nucleotide deleted between bases 25 and 26
  misc_feature (0)...(0): Accession number cg43298234
taaggccagagcttgtgtgctgggccagaaatcacctgctgcatcctgtg

SEQ ID NO: 279 - DNA, 51 bp, Homo sapiens
  allele (26)...(0): single nucleotide polymorphism
  misc_feature (0)...(0): Accession number cg43926358
cagtgatgtgctggccctttcagggccacaggccccttcagcttcaccgga

SEQ ID NO: 280 - DNA, 51 bp, Homo sapiens
  allele (26)...(0): single nucleotide polymorphism
  misc_feature (0)...(0): Accession number cg35060315
ccaaactatctcaccctaccctccccaggatccacttctttggaatgacaa

SEQ ID NO: 281 - DNA, 50 bp, Homo sapiens
  allele (26)...(0): single nucleotide polymorphism
  misc_feature (25)...(26): Nucleotide deleted between bases 25 and 26
  misc_feature (0)...(0): Accession number cg35060315
ctattttatccatccatgttctcccaatctgtgctttctttcaacaggtt

SEQ ID NO: 282 - DNA, 51 bp, Homo sapiens
  allele (26)...(0): single nucleotide polymorphism
  misc_feature (0)...(0): Accession number cg35060315
ttttatccatccatgttctcccaaaatctgtgctttctttcaacaggttat

SEQ ID NO: 283 - DNA, 51 bp, Homo sapiens
  allele (26)...(0): single nucleotide polymorphism
  misc_feature (0)...(0): Accession number cg35060315
gttctcccaaatctgtgctttcttttaacaggttatatattaaaactattt

SEQ ID NO: 284 - DNA, 51 bp, Homo sapiens
  allele (26)...(0): single nucleotide polymorphism
  misc_feature (0)...(0): Accession number cg35060315
cccaaatctgtgctttctttcaacacgttatatattaaaactatttcatga

SEQ ID NO: 285 - DNA, 42 bp, Homo sapiens
  allele (18)...(0): single nucleotide polymorphism
  misc_feature (17)...(18): Nucleotide deleted between bases 17 and 18
  misc_feature (0)...(0): Accession number cg44126579
tgtacaactgattagaggttttttttttctttttcttttcaa

SEQ ID NO: 286 - DNA, 50 bp, Homo sapiens
  allele (26)...(0): single nucleotide polymorphism
  misc_feature (25)...(26): Nucleotide deleted between bases 25 and 26
  misc_feature (0)...(0): Accession number cg43951096
cctctcctccaagagttggttccgcagaggtggaaagaactctcaatagt

SEQ ID NO: 287 - DNA, 50 bp, Homo sapiens
  allele (26)...(0): single nucleotide polymorphism
  misc_feature (25)...(26): Nucleotide deleted between bases 25 and 26
  misc_feature (0)...(0): Accession number cg43951096
cacagccataatatagagaacagagttctccatgaacatccaccaggctg

SEQ ID NO: 288 - DNA, 51 bp, Homo sapiens
  allele (26)...(0): single nucleotide polymorphism
  misc_feature (0)...(0): Accession number cg43960676
agcagccagcttcattggctgcaaatgcctctctcaggtgagtcaaaggag

SEQ ID NO: 289 - DNA, 51 bp, Homo sapiens
  allele (26)...(0): single nucleotide polymorphism
  misc_feature (0)...(0): Accession number cg43323149
tcacctcagatgagtgtggctccccgcgctcccatactgcagcctgcccct

SEQ ID NO: 290 - DNA, 50 bp, Homo sapiens
  allele (26)...(0): single nucleotide polymorphism
  misc_feature (25)...(26): Nucleotide deleted between bases 25 and 26
  misc_feature (0)...(0): Accession number cg43969533
aagggaagcctatcctatttttttttcctttgcgaaaacagaagccaagt

SEQ ID NO: 291 - DNA, 50 bp, Homo sapiens
  allele (26)...(0): single nucleotide polymorphism
  misc_feature (25)...(26): Nucleotide deleted between bases 25 and 26
  misc_feature (0)...(0): Accession number cg43969533
agggaagcctatcctatttttttttcctttgcgaaaacagaagccaagtt

SEQ ID NO: 292 - DNA, 51 bp, Homo sapiens
  allele (26)...(0): single nucleotide polymorphism
  misc_feature (0)...(0): Accession number cg39376027
ccggggaggtggttctggtaatctgtgggggagccgggacaggcgccccga

SEQ ID NO: 293 - DNA, 51 bp, Homo sapiens
  allele (26)...(0): single nucleotide polymorphism
  misc_feature (0)...(0): Accession number cg39376027
gggaggtggttctggtaatctggggtggagccgggacaggcgccccgagtt

SEQ ID NO: 294 - DNA, 51 bp, Homo sapiens
  allele (26)...(0): single nucleotide polymorphism
  misc_feature (0)...(0): Accession number cg43976681
ctctctcttcgccgccgacgcagaagggagctggggaggaaaaagctgctg

SEQ ID NO: 295 - DNA, 51 bp, Homo sapiens
  allele (26)...(0): single nucleotide polymorphism
  misc_feature (0)...(0): Accession number cg43085556
gtaaggtaaaatgtgaatcaatatgctagttctgggcaattattctgcaaa

SEQ ID NO: 296 - DNA, 51 bp, Homo sapiens
  allele (26)...(0): single nucleotide polymorphism
  misc_feature (0)...(0): Accession number cg43085556
caatatgttagttctgggcaattatcctgcaaattctgccagataattaaa

SEQ ID NO: 297 - DNA, 51 bp, Homo sapiens
  allele (26)...(0): single nucleotide polymorphism
  misc_feature (0)...(0): Accession number cg43085556
aatatgttagttctgggcaattattttgcaaattctgccagataattaaag

SEQ ID NO: 298 - DNA, 51 bp, Homo sapiens
  allele (26)...(0): single nucleotide polymorphism
  misc_feature (0)...(0): Accession number cg43085556
ttgttgttctcaagcttttcgcctatattttagactaaccctgcttattcc

SEQ ID NO: 299 - DNA, 51 bp, Homo sapiens
  allele (26)...(0): single nucleotide polymorphism
  misc_feature (0)...(0): Accession number cg43085556
ttttcgcctacattttagactaaccttgcttattcctgtgaatcaagtggt

SEQ ID NO: 300 - DNA, 51 bp, Homo sapiens
  allele (26)...(0): single nucleotide polymorphism
  misc_feature (0)...(0): Accession number cg43085556
taaccctgcttattcctgtgaatcacgtggtgatcttctgcagcttggaat

SEQ ID NO: 301 - DNA, 51 bp, Homo sapiens
  allele (26)...(0): single nucleotide polymorphism
  misc_feature (0)...(0): Accession number cg43920089
gcatttgctgcttgtgcttgattttatttggctcaatcccttcctggcagc

SEQ ID NO: 302 - DNA, 50 bp, Homo sapiens
  allele (26)...(0): single nucleotide polymorphism
  misc_feature (25)...(26): Nucleotide deleted between bases 25 and 26
  misc_feature (0)...(0): Accession number cg43950850
aaacatgttccatcaaattcagaaaagcaggtatcagtgaaactggagca

SEQ ID NO: 303 - DNA, 51 bp, Homo sapiens
  allele (26)...(0): single nucleotide polymorphism
  misc_feature (0)...(0): Accession number cg43950850
aggaaaaccacgacgaccactaccccggcctaagcggtcagctttctcctc

SEQ ID NO: 304 - DNA, 51 bp, Homo sapiens
  allele (26)...(0): single nucleotide polymorphism
  misc_feature (0)...(0): Accession number cg44128084
catccgcgctgacggcagtcaccggcgagaccggcgccggaaagaccatgg

SEQ ID NO: 305 - DNA, 51 bp, Homo sapiens
  allele (26)...(0): single nucleotide polymorphism
  misc_feature (0)...(0): Accession number cg43976473
gacgctcgctgtccccgagggcccgctgcgccgcctcgtgggtacgaatac

SEQ ID NO: 306 - DNA, 51 bp, Homo sapiens
  allele (26)...(0): single nucleotide polymorphism
  misc_feature (0)...(0): Accession number cg44924858
gcttctgtcagacgttactttcaccatgcctgctgtttccacaggaagagt

SEQ ID NO: 307 - DNA, 51 bp, Homo sapiens
  allele (26)...(0): single nucleotide polymorphism
  misc_feature (0)...(0): Accession number cg44924858
cgttactttcaccgtgcctgctgttcccacaggaagagtctgtctgttcca

SEQ ID NO: 308 - DNA, 51 bp, Homo sapiens
  allele (26)...(0): single nucleotide polymorphism
  misc_feature (0)...(0): Accession number cg44924858
accccagcttgcccggcagcacacagaactgtttctttggcttgacgaata

SEQ ID NO: 309 - DNA, 51 bp, Homo sapiens
  allele (26)...(0): single nucleotide polymorphism
  misc_feature (0)...(0): Accession number cg43961591
acaccactggtactcacaccccctccggctgggttctctggtgcgccctgc

SEQ ID NO: 310 - DNA, 51 bp, Homo sapiens
  allele (26)...(0): single nucleotide polymorphism
  misc_feature (0)...(0): Accession number cg43924285
ctgcatatgtttgcagttttccatcgacttcttcataaacaaacaaacatt

SEQ ID NO: 311 - DNA, 51 bp, Homo sapiens
  allele (26)...(0): single nucleotide polymorphism
  misc_feature (0)...(0): Accession number cg43924285
acattttctagaaaccaaaatatgtggtggcccaaaggagctcttaagcaa

SEQ ID NO: 312 - DNA, 51 bp, Homo sapiens
  allele (26)...(0): single nucleotide polymorphism
  misc_feature (0)...(0): Accession number cg43958224
gtttgatcctcagccaggacgcacaagccctacaagatcccagccctccaa

SEQ ID NO: 313 - DNA, 50 bp, Homo sapiens
  allele (26)...(0): single nucleotide polymorphism
  misc_feature (25)...(26): Nucleotide deleted between bases 25 and 26
  misc_feature (0)...(0): Accession number cg43971060
aacggctttaaacacaagctcagggcttggggtttatcccgagggcacag

SEQ ID NO: 314 - DNA, 51 bp, Homo sapiens
  allele (26)...(0): single nucleotide polymorphism
  misc_feature (0)...(0): Accession number cg44927952
tatttttcattgtacttattattcactatacttactatatatatttaaaac

SEQ ID NO: 315 - DNA, 51 bp, Homo sapiens
  allele (26)...(0): single nucleotide polymorphism
  misc_feature (0)...(0): Accession number cg19885484
aaacaacaaaataaccaaacataaatcaactaatgctacacagaatgtgat

SEQ ID NO: 316 - DNA, 36 bp, Homo sapiens
  allele (11)...(0): single nucleotide polymorphism
  misc_feature (0)...(0): Accession number cg42307356
cggccgcggctcggaacggcgcctcccgccccacca

SEQ ID NO: 317 - DNA, 51 bp, Homo sapiens
  allele (26)...(0): single nucleotide polymorphism
  misc_feature (0)...(0): Accession number cg44005017
tgggaggcctggttgcccctcccggtgtgctgggacactctgggttcctgc

SEQ ID NO: 318 - DNA, 51 bp, Homo sapiens
  allele (26)...(0): single nucleotide polymorphism
  misc_feature (0)...(0): Accession number cg43329819
ttgagctctcctacaagctggaggccaacagtcagtgagagcgggggggcc

SEQ ID NO: 319 - DNA, 51 bp, Homo sapiens
  allele (26)...(0): single nucleotide polymorphism
  misc_feature (0)...(0): Accession number cg43329819
agctctcctacaagctggaggcaaatagtcagtgagagcgggggggccagt

SEQ ID NO: 320 - DNA, 51 bp, Homo sapiens
  allele (26)...(0): single nucleotide polymorphism
  misc_feature (0)...(0): Accession number cg43329819
gctggaggcaaacagtcagtgagagtgggggggccagtcagacccgaccaa

SEQ ID NO: 321 - DNA, 50 bp, Homo sapiens
  allele (26)...(0): single nucleotide polymorphism
  misc_feature (25)...(26): Nucleotide deleted between bases 25 and 26
  misc_feature (0)...(0): Accession number cg44015618
cagcctcatagccacacacacacaccgtaccacacacgcacacacacaca

SEQ ID NO: 322 - DNA, 50 bp, Homo sapiens
  allele (26)...(0): single nucleotide polymorphism
  misc_feature (25)...(26): Nucleotide deleted between bases 25 and 26
  misc_feature (0)...(0): Accession number cg44015618
accacacacgcacacacacacacacctttgtggctcaagtgcaggccaca

SEQ ID NO: 323 - DNA, 51 bp, Homo sapiens
  allele (26)...(0): single nucleotide polymorphism
  misc_feature (0)...(0): Accession number cg40361678
caacactttgggaggccgaggcaggcggatcacctgaggtcaggagttcga

SEQ ID NO: 324 - DNA, 51 bp, Homo sapiens
  allele (26)...(0): single nucleotide polymorphism
  misc_feature (0)...(0): Accession number cg40361678
gtgaaaccccgtctctactaaaaattcaaaaattagccgggcatggtggcg

SEQ ID NO: 325 - DNA, 51 bp, Homo sapiens
  allele (26)...(0): single nucleotide polymorphism
  misc_feature (0)...(0): Accession number cg40361678
ctaaaaatacaaaaattagccgggcgtggtggcggatgcctgtaatcccag

SEQ ID NO: 326 - DNA, 51 bp, Homo sapiens
  allele (26)...(0): single nucleotide polymorphism
  misc_feature (0)...(0): Accession number cg43930957
aaaataaaactcttttgaaagttgttggtcagctgaccaggtagaggattc

SEQ ID NO: 327 - DNA, 51 bp, Homo sapiens
  allele (26)...(0): single nucleotide polymorphism
  misc_feature (0)...(0): Accession number cg43300636
caaaggcggcaaagatggggaccagtaccacagccgccacgcccacctccc

SEQ ID NO: 328 - DNA, 51 bp, Homo sapiens
  allele (26)...(0): single nucleotide polymorphism
  misc_feature (0)...(0): Accession number cg43967912
cattctctctccaaaatttctcagacttgtgcacaggactccattccaacc

SEQ ID NO: 329 - DNA, 51 bp, Homo sapiens
  allele (26)...(0): single nucleotide polymorphism
  misc_feature (0)...(0): Accession number cg43967912
aaaatttctcagatttgtgcacagggctccattccaaccttccagatttaa

SEQ ID NO: 330 - DNA, 51 bp, Homo sapiens
  allele (26)...(0): single nucleotide polymorphism
  misc_feature (0)...(0): Accession number cg43967912
atttgtgcacaggactccattccaatcttccagatttaagttctgaactgt

SEQ ID NO: 331 - DNA, 51 bp, Homo sapiens
  allele (26)...(0): single nucleotide polymorphism
  misc_feature (0)...(0): Accession number cg43132502
agtgggtggcaccgccgaggctgctattacggctcatcttcattgatttgc

SEQ ID NO: 332 - DNA, 51 bp, Homo sapiens
  allele (26)...(0): single nucleotide polymorphism
  misc_feature (0)...(0): Accession number cg44924856
acacgcccagcagccgaatgatgttggggtccttgagcctcgacatgatct

SEQ ID NO: 333 - DNA, 51 bp, Homo sapiens
  allele (26)...(0): single nucleotide polymorphism
  misc_feature (0)...(0): Accession number cg43991318
agcactcccctggctcacccttctcccctcgtggtcctttttcacctggtg

SEQ ID NO: 334 - DNA, 51 bp, Homo sapiens
  allele (26)...(0): single nucleotide polymorphism
  misc_feature (0)...(0): Accession number cg41553795
ctgtgcacgtggttgtcgctgagactgactaccagagtttcgctgtcctgt

SEQ ID NO: 335 - DNA, 51 bp, Homo sapiens
  allele (26)...(0): single nucleotide polymorphism
  misc_feature (0)...(0): Accession number cg43973728
gcaaattcagatgcaaagccgtggctaacgggaaggttcttccgaatgatc

SEQ ID NO: 336 - DNA, 51 bp, Homo sapiens
  allele (26)...(0): single nucleotide polymorphism
  misc_feature (0)...(0): Accession number cg43312829
tccaatcaaagacaacaggactccacgtaactgaatatgaggacaatttga

SEQ ID NO: 337 - DNA, 51 bp, Homo sapiens
  allele (26)...(0): single nucleotide polymorphism
  misc_feature (0)...(0): Accession number cg43312829
agacaacaggactccatgtaactgagtatgaggacaatttgaagaaatcat

SEQ ID NO: 338 - DNA, 51 bp, Homo sapiens
  allele (26)...(0): single nucleotide polymorphism
  misc_feature (0)...(0): Accession number cg43312829
aggacaatttgaagaaatcatgggtgtggaaagagctatattctgttagaa

SEQ ID NO: 339 - DNA, 51 bp, Homo sapiens
  allele (26)...(0): single nucleotide polymorphism
  misc_feature (0)...(0): Accession number cg43312829
gggtatggaaagagctatattctgtcagaaatataaggccatcctgccacg

SEQ ID NO: 340 - DNA, 51 bp, Homo sapiens
  allele (26)...(0): single nucleotide polymorphism
  misc_feature (0)...(0): Accession number cg43312829
actggatattgagaggaatggagccatggactctaaaacataaaggctctg

SEQ ID NO: 341 - DNA, 51 bp, Homo sapiens
  allele (26)...(0): single nucleotide polymorphism
  misc_feature (0)...(0): Accession number cg43312829
ttgaacggctcaagccagccaaggactgtacacccattgagtatccaaaac

SEQ ID NO: 342 - DNA, 51 bp, Homo sapiens
  allele (26)...(0): single nucleotide polymorphism
  misc_feature (0)...(0): Accession number cg43307992
tcgagggccccaactttgagttctcaacggagacccatgaggagctgctgt

SEQ ID NO: 343 - DNA, 51 bp, Homo sapiens
  allele (26)...(0): single nucleotide polymorphism
  misc_feature (0)...(0): Accession number cg43969759
tggctgtgggcttcaccagcctcactacctcctccagggagttgacttcag

SEQ ID NO: 344 - DNA, 51 bp, Homo sapiens
  allele (26)...(0): single nucleotide polymorphism
  misc_feature (0)...(0): Accession number cg39523614
atgctggatcagatccagctgcacttaagtgtcgagccgacgaagatgggg

SEQ ID NO: 345 - DNA, 51 bp, Homo sapiens
  allele (26)...(0): single nucleotide polymorphism
  misc_feature (0)...(0): Accession number cg39523614
aagatggggacagtttcgtcctgaatggcgtcaaggcttgggtcacggagg

SEQ ID NO: 346 - DNA, 51 bp, Homo sapiens
  allele (26)...(0): single nucleotide polymorphism
  misc_feature (0)...(0): Accession number cg39523614
gggacagtttcgtcctgaacggcgttaaggcttgggtcacggaggctggcg

SEQ ID NO: 347 - DNA, 51 bp, Homo sapiens
  allele (26)...(0): single nucleotide polymorphism
  misc_feature (0)...(0): Accession number cg39523614
tcgagggcacggtctgagtgttgctctgggtacgcttgacaactctcgtgt

SEQ ID NO: 348 - DNA, 51 bp, Homo sapiens
  allele (26)...(0): single nucleotide polymorphism
  misc_feature (0)...(0): Accession number cg39523614
gtgtctcgattgctgctcaagcagtaggaattgcccagggagctttagaca

SEQ ID NO: 349 - DNA, 51 bp, Homo sapiens
  allele (26)...(0): single nucleotide polymorphism
  misc_feature (0)...(0): Accession number cg42717491
aggctcacactcacttcatgttcttgacaaagtcctcgcctttcttgatgg

SEQ ID NO: 350 - DNA, 51 bp, Homo sapiens
  allele (26)...(0): single nucleotide polymorphism
  misc_feature (0)...(0): Accession number cg42717491
tgatggaggctttcagctcagggatagcctcggcaatcattttctcctcaa

SEQ ID NO: 351 - DNA, 51 bp, Homo sapiens
  allele (26)...(0): single nucleotide polymorphism
  misc_feature (0)...(0): Accession number cg42717491
cagggatggcctcggcaatcattttttcctcaaaaggagtgattttgccaa

SEQ ID NO: 352 - DNA, 51 bp, Homo sapiens
  allele (26)...(0): single nucleotide polymorphism
  misc_feature (0)...(0): Accession number cg42717491
tcattttctcctcaaaaggagtgatcttgccaatgcctaggttcttctcca

SEQ ID NO: 353 - DNA, 51 bp, Homo sapiens
  allele (26)...(0): single nucleotide polymorphism
  misc_feature (0)...(0): Accession number cg42711596
atttagtatgctgtgagctgtctttggttgaatctgatttagtttcagttc

SEQ ID NO: 354 - DNA, 51 bp, Homo sapiens
  allele (26)...(0): single nucleotide polymorphism
  misc_feature (0)...(0): Accession number cg43319420
agaagtcagaaggccttcctgtggccccgttcatggaccgagacaaagtga

SEQ ID NO: 355 - DNA, 51 bp, Homo sapiens
  allele (26)...(0): single nucleotide polymorphism
  misc_feature (0)...(0): Accession number cg41029366
agtggggatcagtgtgcgatgacacctgggacctggaggacgcccacgtgg

SEQ ID NO: 356 - DNA, 51 bp, Homo sapiens
  allele (26)...(0): single nucleotide polymorphism
  misc_feature (0)...(0): Accession number cg42876034
gcgcccgccgcggcagcgccccgagcccggcttcggcccgcagcctggacg

SEQ ID NO: 357 - DNA, 51 bp, Homo sapiens
  allele (26)...(0): single nucleotide polymorphism
  misc_feature (0)...(0): Accession number cg43976227
ctggtgtgatctctgtctctttatgaaccactactttggtcactgacatgt

SEQ ID NO: 358 - DNA, 51 bp, Homo sapiens
  allele (26)...(0): single nucleotide polymorphism
  misc_feature (0)...(0): Accession number cg43916642
ggctgaaaagcatatctatacattcagagaagtcgcaaatagaaaggaaaa

SEQ ID NO: 359 - DNA, 51 bp, Homo sapiens
  allele (26)...(0): single nucleotide polymorphism
  misc_feature (0)...(0): Accession number cg43925670
aaccagcatcacctcggaacttttcctccatcaagtcagcaatctgaattt

SEQ ID NO: 360 - DNA, 51 bp, Homo sapiens
  allele (26)...(0): single nucleotide polymorphism
  misc_feature (0)...(0): Accession number cg43925670
ttgtcatactcttctctcatttttagattaagttttaaatcgttgctcagt

SEQ ID NO: 361 - DNA, 51 bp, Homo sapiens
  allele (26)...(0): single nucleotide polymorphism
  misc_feature (0)...(0): Accession number cg43925670
tttttaaattaagttttaaatcgttactcagtaaggacttaaccattctaa

SEQ ID NO: 362 - DNA, 51 bp, Homo sapiens
  allele (26)...(0): single nucleotide polymorphism
  misc_feature (0)...(0): Accession number cg43925670
aatcattgatgacctctaatcctttcagtagaacaatgttcttgtattttt

SEQ ID NO: 363 - DNA, 51 bp, Homo sapiens
  allele (26)...(0): single nucleotide polymorphism
  misc_feature (0)...(0): Accession number cg44004587
ttttattgtcattttcatcaataagaatacacatctctgccaggagttgaa

SEQ ID NO: 364 - DNA, 51 bp, Homo sapiens
  allele (26)...(0): single nucleotide polymorphism
  misc_feature (0)...(0): Accession number cg43257400
catgtgtggtaactcctcaagatggcgagacgttagcacaaatgatagaag

SEQ ID NO: 365 - DNA, 51 bp, Homo sapiens
  allele (26)...(0): single nucleotide polymorphism
  misc_feature (0)...(0): Accession number cg43931272
ttggtggttctttcccaaccacaaagcactccggtggtaaataccaataag

SEQ ID NO: 366 - DNA, 51 bp, Homo sapiens
  allele (26)...(0): single nucleotide polymorphism
  misc_feature (0)...(0): Accession number cg42665067
ggggcttctacatatccccccgaagtaccttcagcactctgcaggagctgg

SEQ ID NO: 367 - DNA, 51 bp, Homo sapiens
  allele (26)...(0): single nucleotide polymorphism
  misc_feature (0)...(0): Accession number cg43982923
cgatgcagaaatacgagaaactggagaagattggggaaggcacctacggaa

SEQ ID NO: 368 - DNA, 51 bp, Homo sapiens
  allele (26)...(0): single nucleotide polymorphism
  misc_feature (0)...(0): Accession number cg43982923
tggaaaagattggggaaggcacctatggaactgtgttcaaggccaaaaacc

SEQ ID NO: 369 - DNA, 51 bp, Homo sapiens
  allele (26)...(0): single nucleotide polymorphism
  misc_feature (0)...(0): Accession number cg43982923
ccaaaaaccgggagactcatgagattgtggctctgaaacgggtgaggctgg

SEQ ID NO: 370 - DNA, 51 bp, Homo sapiens
  allele (26)...(0): single nucleotide polymorphism
  misc_feature (0)...(0): Accession number cg43919086
cgctcaggaggatataggtgatgacgccgatgctccacatgtccgcctcca

SEQ ID NO: 371 - DNA, 51 bp, Homo sapiens
  allele (26)...(0): single nucleotide polymorphism
  misc_feature (0)...(0): Accession number cg25143358
gggcggcttcaagtttcgtggtcataccgccggttcccacccccgaaccag

SEQ ID NO: 372 - DNA, 51 bp, Homo sapiens
  allele (26)...(0): single nucleotide polymorphism
  misc_feature (0)...(0): Accession number cg43105476
ggttccgatgccccacattgctggctgtgtgcttcaccaggaactccacca

SEQ ID NO: 373 - DNA, 51 bp, Homo sapiens
  allele (26)...(0): single nucleotide polymorphism
  misc_feature (0)...(0): Accession number cg43105476
tgtgcttcaccaggaactccaccacacggaggtggccttctttggcagcca

SEQ ID NO: 374 - DNA, 51 bp, Homo sapiens
  allele (26)...(0): single nucleotide polymorphism
  misc_feature (0)...(0): Accession number cg43105476
gcaagggcaggttcccttcattatcttcgatgttaacatcagcttgaaact

SEQ ID NO: 375 - DNA, 51 bp, Homo sapiens
  allele (26)...(0): single nucleotide polymorphism
  misc_feature (0)...(0): Accession number cg43105476
tatcctcgatgttaacatcagcttggaactccagcaaagtctgtaaagtgt

SEQ ID NO: 376 - DNA, 51 bp, Homo sapiens
  allele (26)...(0): single nucleotide polymorphism
  misc_feature (0)...(0): Accession number cg43939695
cagggaacagcaatgggaacgccagcatcaacatcacggacatctcaagga

SEQ ID NO: 377 - DNA, 51 bp, Homo sapiens
  allele (26)...(0): single nucleotide polymorphism
  misc_feature (0)...(0): Accession number cg43939695
gcaatgggaacgccagtatcaacattacggacatctcaaggaatatcactt

SEQ ID NO: 378 - DNA, 51 bp, Homo sapiens
  allele (26)...(0): single nucleotide polymorphism
  misc_feature (0)...(0): Accession number cg43939695
cttccatacacatagagaactggcgaagtcttcacacgctcaacgccgtgg

SEQ ID NO: 379 - DNA, 51 bp, Homo sapiens
  allele (26)...(0): single nucleotide polymorphism
  misc_feature (0)...(0): Accession number cg43939695
tacacatagagaactggcgcagtctgcacacgctcaacgccgtggacatgg

SEQ ID NO: 380 - DNA, 51 bp, Homo sapiens
  allele (26)...(0): single nucleotide polymorphism
  misc_feature (0)...(0): Accession number cg43939695
tagagaactggcgcagtcttcacacactcaacgccgtggacatggagctct

SEQ ID NO: 381 - DNA, 51 bp, Homo sapiens
  allele (26)...(0): single nucleotide polymorphism
  misc_feature (0)...(0): Accession number cg43939695
actggcgcagtcttcacacgctcaatgccgtggacatggagctctacaccg

SEQ ID NO: 382 - DNA, 51 bp, Homo sapiens
  allele (26)...(0): single nucleotide polymorphism
  misc_feature (0)...(0): Accession number cg43939695
acgccgtggacatggagctctacacgggacttcaaaagctgaccatcaaga

SEQ ID NO: 383 - DNA, 51 bp, Homo sapiens
  allele (26)...(0): single nucleotide polymorphism
  misc_feature (0)...(0): Accession number cg43939695
acatggagctctacaccggacttcagaagctgaccatcaagaactcaggac

SEQ ID NO: 384 - DNA, 51 bp, Homo sapiens
  allele (26)...(0): single nucleotide polymorphism
  misc_feature (0)...(0): Accession number cg29023997
tggtttccattttcaatctggatggaatggagcaccatgtgcgcacctgca

SEQ ID NO: 385 - DNA, 51 bp, Homo sapiens
  allele (26)...(0): single nucleotide polymorphism
  misc_feature (0)...(0): Accession number cg43942537
gttcttctagggcctgtaaaacttccttcacttcttctttagaggcatcat

SEQ ID NO: 386 - DNA, 51 bp, Homo sapiens
  allele (26)...(0): single nucleotide polymorphism
  misc_feature (0)...(0): Accession number cg43975720
tccggaagtggaagtggtaccagtttacgtctctgcgggacctgctgtggg

SEQ ID NO: 387 - DNA, 51 bp, Homo sapiens
  allele (26)...(0): single nucleotide polymorphism
  misc_feature (0)...(0): Accession number cg43975720
ctctgcgggacctgctgtggggcaatgccatcttcctcaaggaggccaatg

SEQ ID NO: 388 - DNA, 51 bp, Homo sapiens
  allele (26)...(0): single nucleotide polymorphism
  misc_feature (0)...(0): Accession number cg43311943
tcgggcccgatgaccccaatgtggccaagaccaagaacaacctggcttcct

SEQ ID NO: 389 - DNA, 51 bp, Homo sapiens
  allele (26)...(0): single nucleotide polymorphism
  misc_feature (0)...(0): Accession number cg43311943
acaacctggcttcctgctacctgaagcagggcaagtaccaggatgcagaga

SEQ ID NO: 390 - DNA, 51 bp, Homo sapiens
  allele (26)...(0): single nucleotide polymorphism
  misc_feature (0)...(0): Accession number cg43983535
tctctggggcccgctgaggtgacagtaagtgctttagctcctgagtcatat

SEQ ID NO: 391 - DNA, 51 bp, Homo sapiens
  allele (26)...(0): single nucleotide polymorphism
  misc_feature (0)...(0): Accession number cg42488873
atcctttgaaaatctcatattgttttgagttttcattacttccatacaaag

SEQ ID NO: 392 - DNA, 51 bp, Homo sapiens
  allele (26)...(0): single nucleotide polymorphism
  misc_feature (0)...(0): Accession number cg43935885
ggaagccccagctgcaggagctgctgaagctgcccgccttcatgcgggtaa

SEQ ID NO: 393 - DNA, 51 bp, Homo sapiens
  allele (26)...(0): single nucleotide polymorphism
  misc_feature (0)...(0): Accession number cg44019843
atgtggagtacaccttcacagggatttacacctttgagtccctcatcaaga

SEQ ID NO: 394 - DNA, 51 bp, Homo sapiens
  allele (26)...(0): single nucleotide polymorphism
  misc_feature (0)...(0): Accession number cg44929972
atgtcctgagggcagtggaggaacgagattttccaacagaaaccattaaat

SEQ ID NO: 395 - DNA, 51 bp, Homo sapiens
  allele (26)...(0): single nucleotide polymorphism
  misc_feature (0)...(0): Accession number cg44926604
agtcgatgtccagcttgcgggccacacggtgtagattgggcaggttcagct

SEQ ID NO: 396 - DNA, 51 bp, Homo sapiens
  allele (26)...(0): single nucleotide polymorphism
  misc_feature (0)...(0): Accession number cg38642684
gccagttaatattgcctagtaatttttgataatcatttaaggtatgtaagt

SEQ ID NO: 397 - DNA, 51 bp, Homo sapiens
  allele (26)...(0): single nucleotide polymorphism
  misc_feature (0)...(0): Accession number cg38642684
aaggatacttccaaggagaggacatctgtactttttcaggtgcaatgatta

SEQ ID NO: 398 - DNA, 51 bp, Homo sapiens
  allele (26)...(0): single nucleotide polymorphism
  misc_feature (0)...(0): Accession number cg38642684
aggacatttgtactttttcaggtgctatgattaaaccacttaactgtgcat

SEQ ID NO: 399 - DNA, 51 bp, Homo sapiens
  allele (26)...(0): single nucleotide polymorphism
  misc_feature (0)...(0): Accession number cg38642684
tccttatgacagaggtatataaactcaaaagcactggctccactggggctg

SEQ ID NO: 400 - DNA, 51 bp, Homo sapiens
  allele (26)...(0): single nucleotide polymorphism
  misc_feature (0)...(0): Accession number cg43919677
ttgaagtagctcctgaagcttctacatctagtgccagccaagtgattgctc

SEQ ID NO: 401 - DNA, 51 bp, Homo sapiens
  allele (26)...(0): single nucleotide polymorphism
  misc_feature (0)...(0): Accession number cg44005163
cctgtgggctgattacattaactgacgcacaaagattatgtaatgctttat

SEQ ID NO: 402 - DNA, 51 bp, Homo sapiens
  allele (26)...(0): single nucleotide polymorphism
  misc_feature (0)...(0): Accession number cg44005163
gtaatgctttattgcggccacgaacgtttcctcaaaatggtagcgtacttc

SEQ ID NO: 403 - DNA, 51 bp, Homo sapiens
  allele (26)...(0): single nucleotide polymorphism
  misc_feature (0)...(0): Accession number cg25334466
tcaaggaccagttcactaccctccccgaggtgaaggactgatgctttgcca

SEQ ID NO: 404 - DNA, 51 bp, Homo sapiens
  allele (26)...(0): single nucleotide polymorphism
  misc_feature (0)...(0): Accession number cg42535091
aactgaaatacgacgttggtggaggggaacggtttgattctttgacagatc

SEQ ID NO: 405 - DNA, 51 bp, Homo sapiens
  allele (26)...(0): single nucleotide polymorphism
  misc_feature (0)...(0): Accession number cg43302847
ggtggtggtggccatccagatcctgaggaagaaccccaaaggcttcttctt

SEQ ID NO: 406 - DNA, 51 bp, Homo sapiens
  allele (26)...(0): single nucleotide polymorphism
  misc_feature (0)...(0): Accession number cg39728924
ggcaaatggtgttggaaaataattcaaatgttattgccatgataaccagag

SEQ ID NO: 407 - DNA, 51 bp, Homo sapiens
  allele (26)...(0): single nucleotide polymorphism
  misc_feature (0)...(0): Accession number cg42881873
acctgaaagcgagcgactggaaagtgaacggcgcgggtcataaagttagcc

SEQ ID NO: 408 - DNA, 51 bp, Homo sapiens
  allele (26)...(0): single nucleotide polymorphism
  misc_feature (0)...(0): Accession number cg42913398
ctgttccgtggatgagaagatagtccacatttctgaaatattctgctcttg

SEQ ID NO: 409 - DNA, 51 bp, Homo sapiens
  allele (26)...(0): single nucleotide polymorphism
  misc_feature (0)...(0): Accession number cg44028327
ttcgaattacctactcaattgtgcagacgaattgttccaaagagaattttc

SEQ ID NO: 410 - DNA, 51 bp, Homo sapiens
  allele (26)...(0): single nucleotide polymorphism
  misc_feature (0)...(0): Accession number cg43979831
cctcaaggaccactcccaaagacttttatgttgatgagaacacaacagtcc

SEQ ID NO: 411 - DNA, 51 bp, Homo sapiens
  allele (26)...(0): single nucleotide polymorphism
  misc_feature (0)...(0): Accession number cg43987538
atcatcataagagaagaatcattttaccagtagccccactaccatgaatga

SEQ ID NO: 412 - DNA, 51 bp, Homo sapiens
  allele (26)...(0): single nucleotide polymorphism
  misc_feature (0)...(0): Accession number cg42717608
cccacaaggtctatgtccagcaccttctgaagagagacaaagaacacctgt

SEQ ID NO: 413 - DNA, 51 bp, Homo sapiens
  allele (26)...(0): single nucleotide polymorphism
  misc_feature (0)...(0): Accession number cg43927378
atctgatggagaactaccagatcgtcgtcagcaacctggccactgagcgtg

SEQ ID NO: 414 - DNA, 51 bp, Homo sapiens
  allele (26)...(0): single nucleotide polymorphism
  misc_feature (0)...(0): Accession number cg43945592
gggctcgggcagggtacacaaactccgtggctgcaaaatccccagaggagc

SEQ ID NO: 415 - DNA, 51 bp, Homo sapiens
  allele (26)...(0): single nucleotide polymorphism
  misc_feature (0)...(0): Accession number cg43957486
ctggggctccccgctgccagtgcccggccggcgccgccctgcaggcagacg

SEQ ID NO: 416 - DNA, 51 bp, Homo sapiens
  allele (26)...(0): single nucleotide polymorphism
  misc_feature (0)...(0): Accession number cg44932934
tgctcgaggatgtcaaccgcatgtcacctggggcgctggccattatcttcg

SEQ ID NO: 417 - DNA, 51 bp, Homo sapiens
  allele (26)...(0): single nucleotide polymorphism
  misc_feature (0)...(0): Accession number cg43100187
aacgcctagagggggagctggtggcacatgagcctgccatccagaatgtgc

SEQ ID NO: 418 - DNA, 51 bp, Homo sapiens
  allele (26)...(0): single nucleotide polymorphism
  misc_feature (0)...(0): Accession number cg42930605
ggtccatgcacaccttgtgcttcgaacccagcagggccttgagcatggcat

SEQ ID NO: 419 - DNA, 51 bp, Homo sapiens
  allele (26)...(0): single nucleotide polymorphism
  misc_feature (0)...(0): Accession number cg42930605
ggggccgcttgaacttgccccgcaggtcaaatagcttctggttcatgtcct

SEQ ID NO: 420 - DNA, 51 bp, Homo sapiens
  allele (26)...(0): single nucleotide polymorphism
  misc_feature (0)...(0): Accession number cg42930605
gatcaaatagcttctggttcatgtcttccagctccttgctggtcttctgca

SEQ ID NO: 421 - DNA, 51 bp, Homo sapiens
  allele (26)...(0): single nucleotide polymorphism
  misc_feature (0)...(0): Accession number cg42930605
tcttctgcaccctcacctccatgtcatacttctcctcttcagccgcatcga

SEQ ID NO: 422 - DNA, 51 bp, Homo sapiens
  allele (26)...(0): single nucleotide polymorphism
  misc_feature (0)...(0): Accession number cg42930605
tctcctcttcagccgcatcgatcttcgcgtgcagctgtttgcagagctcct

SEQ ID NO: 423 - DNA, 51 bp, Homo sapiens
  allele (26)...(0): single nucleotide polymorphism
  misc_feature (0)...(0): Accession number cg42930605
cagccgcatcgatcttggcgtgcagttgtttgcagagctcctgcacttcag

SEQ ID NO: 424 - DNA, 51 bp, Homo sapiens
  allele (26)...(0): single nucleotide polymorphism
  misc_feature (0)...(0): Accession number cg42930605
tcttggcgtgcagctgtttgcagagttcctgcacttcagacatggagcccg

SEQ ID NO: 425 - DNA, 51 bp, Homo sapiens
  allele (26)...(0): single nucleotide polymorphism
  misc_feature (0)...(0): Accession number cg42930605
gcacttcagacatggagcccgggatgtgcagcggcgggcagtgctccgcca

SEQ ID NO: 426 - DNA, 51 bp, Homo sapiens
  allele (26)...(0): single nucleotide polymorphism
  misc_feature (0)...(0): Accession number cg42930605
cagacatggagcccgggatatgcagaggcgggcagtgctccgccaggtagt

SEQ ID NO: 427 - DNA, 51 bp, Homo sapiens
  allele (26)...(0): single nucleotide polymorphism
  misc_feature (0)...(0): Accession number cg42930605
tctgcttctctgcctcacggcggctttcctccttctccagctccgtggccg

SEQ ID NO: 428 - DNA, 51 bp, Homo sapiens
  allele (26)...(0): single nucleotide polymorphism
  misc_feature (0)...(0): Accession number cg42930605
tctctgcctcacggcggctctcctctttctccagctccgtggccgctatct

SEQ ID NO: 429 - DNA, 51 bp, Homo sapiens
  allele (26)...(0): single nucleotide polymorphism
  misc_feature (0)...(0): Accession number cg42893961
aatggccagcaggaaggcggggaccaggggcaaggtggcagccaccaagca

SEQ ID NO: 430 - DNA, 51 bp, Homo sapiens
  allele (26)...(0): single nucleotide polymorphism
  misc_feature (0)...(0): Accession number cg42475816
aatcaagacaaacccgaattgaaaaaaagattgaagcccactttgatgcca

SEQ ID NO: 431 - DNA, 51 bp, Homo sapiens
  allele (26)...(0): single nucleotide polymorphism
  misc_feature (0)...(0): Accession number cg42522566
tgaagaacgtaaaggaccgggaggacgtgaagaatgaggtcaacatcatga

SEQ ID NO: 432 - DNA, 51 bp, Homo sapiens
  allele (26)...(0): single nucleotide polymorphism
  misc_feature (0)...(0): Accession number cg43297806
gtagatgggtagaatagtagccaggaacaagacagcggttctgcagggagc

SEQ ID NO: 433 - DNA, 51 bp, Homo sapiens
  allele (26)...(0): single nucleotide polymorphism
  misc_feature (0)...(0): Accession number cg43297806
tagaatagtagccagggacaagacaacggttctgcagggagcgtagtgcca

SEQ ID NO: 434 - DNA, 51 bp, Homo sapiens
  allele (26)...(0): single nucleotide polymorphism
  misc_feature (0)...(0): Accession number cg43297806
ccagggacaagacagcggttctgcaaggagcgtagtgccagaggggtctgg

SEQ ID NO: 435 - DNA, 51 bp, Homo sapiens
  allele (26)...(0): single nucleotide polymorphism
  misc_feature (0)...(0): Accession number cg43297806
gtagtgccagaggggtctgggaggaagctgaaatcacctgatagaaggtat

SEQ ID NO: 436 - DNA, 51 bp, Homo sapiens
  allele (26)...(0): single nucleotide polymorphism
  misc_feature (0)...(0): Accession number cg43297806
gggtctgggaggaggctgaaatcacttgatagaaggtatagttcagagcaa

SEQ ID NO: 437 - DNA, 51 bp, Homo sapiens
  allele (26)...(0): single nucleotide polymorphism
  misc_feature (0)...(0): Accession number cg43297806
tctgggaggaggctgaaatcacctggtagaaggtatagttcagagcaactg

SEQ ID NO: 438 - DNA, 51 bp, Homo sapiens
  allele (26)...(0): single nucleotide polymorphism
  misc_feature (0)...(0): Accession number cg43297806
aggctgaaatcacctgatagaaggtgtagttcagagcaactgggtctccat

SEQ ID NO: 439 - DNA, 51 bp, Homo sapiens
  allele (26)...(0): single nucleotide polymorphism
  misc_feature (0)...(0): Accession number cg43297806
gatagaaggtatagttcagagcaacagggtctccatgggctcgctgatgct

SEQ ID NO: 440 - DNA, 51 bp, Homo sapiens
  allele (26)...(0): single nucleotide polymorphism
  misc_feature (0)...(0): Accession number cg43297806
cagaggggtagtaagtcagccagcgctgtagatgggtagaatagtagccag

SEQ ID NO: 441 - DNA, 51 bp, Homo sapiens
  allele (26)...(0): single nucleotide polymorphism
  misc_feature (0)...(0): Accession number cg39515668
cagccacattccggtaagcctcgcagagagccagctgggcgccaagatacg

SEQ ID NO: 442 - DNA, 51 bp, Homo sapiens
  allele (26)...(0): single nucleotide polymorphism
  misc_feature (0)...(0): Accession number cg39515668
cgatgccgaggttgtcgtcaatacggatcatgccggcatcattcggctgag

SEQ ID NO: 443 - DNA, 51 bp, Homo sapiens
  allele (26)...(0): single nucleotide polymorphism
  misc_feature (0)...(0): Accession number cg39515668
tcggctgagcgagcacagtattgccgcgcacgaaccggtcatactggtcgg

SEQ ID NO: 444 - DNA, 51 bp, Homo sapiens
  allele (26)...(0): single nucleotide polymorphism
  misc_feature (0)...(0): Accession number cg39515668
gggcggagccaacaagggccagcagcgccccagcaagaccctcaccagagt

SEQ ID NO: 445 - DNA, 51 bp, Homo sapiens
  allele (26)...(0): single nucleotide polymorphism
  misc_feature (0)...(0): Accession number cg21428405
tgacctcgccaatgacagtggcagcaacaccccaatgggcgcagatctcca

SEQ ID NO: 446 - DNA, 51 bp, Homo sapiens
  allele (26)...(0): single nucleotide polymorphism
  misc_feature (0)...(0): Accession number cg21428405
cctgggactcgctcatgaggatctcctcaggggcgaggttcgggtcgcgca

SEQ ID NO: 447 - DNA, 51 bp, Homo sapiens
  allele (26)...(0): single nucleotide polymorphism
  misc_feature (0)...(0): Accession number cg21428405
gaacgcggtcgagctcgacgtgcataccaccgtcgccagcactggccagct

SEQ ID NO: 448 - DNA, 51 bp, Homo sapiens
  allele (26)...(0): single nucleotide polymorphism
  misc_feature (0)...(0): Accession number cg38924050
tctcgttgatgaggtcgttaccctcgcgggtacgttcaccgacaccggcga

SEQ ID NO: 449 - DNA, 51 bp, Homo sapiens
  allele (26)...(0): single nucleotide polymorphism
  misc_feature (0)...(0): Accession number cg38924050
tgaggtcgttaccctcacgggtacgctcaccgacaccggcgaaaaccgaag

SEQ ID NO: 450 - DNA, 51 bp, Homo sapiens
  allele (26)...(0): single nucleotide polymorphism
  misc_feature (0)...(0): Accession number cg38924050
aaaccgaagtaccgccgaagttgtgcgcgatacggtaaatcatctcctgaa

SEQ ID NO: 451 - DNA, 51 bp, Homo sapiens
  allele (26)...(0): single nucleotide polymorphism
  misc_feature (0)...(0): Accession number cg43925970
gagcacataaggtgaaggtggtgacacccagagaagcgacctctatatagg

SEQ ID NO: 452 - DNA, 51 bp, Homo sapiens
  allele (26)...(0): single nucleotide polymorphism
  misc_feature (0)...(0): Accession number cg41616031
aagggatgtccccaaacttccagtccgaacgccgcacatagtagtccatca

SEQ ID NO: 453 - DNA, 51 bp, Homo sapiens
  allele (26)...(0): single nucleotide polymorphism
  misc_feature (0)...(0): Accession number cg41616031
tccccaaacttccagtctgaacgcctcacatagtagtccatcacgaacggc

SEQ ID NO: 454 - DNA, 51 bp, Homo sapiens
  allele (26)...(0): single nucleotide polymorphism
  misc_feature (0)...(0): Accession number cg41616031
ggcagatgatcagtagaaagtcagccactgccaggttgaacaggaaaatcc

SEQ ID NO: 455 - DNA, 51 bp, Homo sapiens
  allele (26)...(0): single nucleotide polymorphism
  misc_feature (0)...(0): Accession number cg42489842
ggctggtcaacacaggtcttctgacgctgcgccagattgttttgagcaaag

SEQ ID NO: 456 - DNA, 51 bp, Homo sapiens
  allele (26)...(0): single nucleotide polymorphism
  misc_feature (0)...(0): Accession number cg42489842
acacaggtcttctgaccctgcgccaaattgttttgagcaaagttgatcagt

SEQ ID NO: 457 - DNA, 51 bp, Homo sapiens
  allele (26)...(0): single nucleotide polymorphism
  misc_feature (0)...(0): Accession number cg42489842
gccagattgttttgagcaaagttgaccagtctcttcataccaacacatcgc

SEQ ID NO: 458 - DNA, 51 bp, Homo sapiens
  allele (26)...(0): single nucleotide polymorphism
  misc_feature (0)...(0): Accession number cg42489842
ttttgagcaaagttgatcagtctctccataccaacacatcgctggatgctg

SEQ ID NO: 459 - DNA, 51 bp, Homo sapiens
  allele (26)...(0): single nucleotide polymorphism
  misc_feature (0)...(0): Accession number cg42489842
ttcataccaacacatcgctggatgccgcaagtgaatatgccaaatactgct

SEQ ID NO: 460 - DNA, 51 bp, Homo sapiens
  allele (26)...(0): single nucleotide polymorphism
  misc_feature (0)...(0): Accession number cg42489842
cgctggatgctgcaagtgaatatgctaaatactgctcagaaatattaggag

SEQ ID NO: 461 - DNA, 51 bp, Homo sapiens
  allele (26)...(0): single nucleotide polymorphism
  misc_feature (0)...(0): Accession number cg42927358
ttttgtctttgccaaacatcatcctaacaaatggtcagccaacagaggaca

SEQ ID NO: 462 - DNA, 51 bp, Homo sapiens
  allele (26)...(0): single nucleotide polymorphism
  misc_feature (0)...(0): Accession number cg42927358
atgaatttgacacaattgtcttgccagtgctttatctcattatatttgtgg

SEQ ID NO: 463 - DNA, 51 bp, Homo sapiens
  allele (26)...(0): single nucleotide polymorphism
  misc_feature (0)...(0): Accession number cg32423505
ccctcctcctggctgagaaaaagtttcccttgtgcaaaaacactaggtacc

SEQ ID NO: 464 - DNA, 51 bp, Homo sapiens
  allele (26)...(0): single nucleotide polymorphism
  misc_feature (0)...(0): Accession number cg43968711
tatgattggatgtggaagaactatccgttgcattcacatttaaacgattgg

SEQ ID NO: 465 - DNA, 51 bp, Homo sapiens
  allele (26)...(0): single nucleotide polymorphism
  misc_feature (0)...(0): Accession number cg43297259
ctcctgtgtgtgtccttaagtgtctaatgaggtgtgacttctggctaaagc

SEQ ID NO: 466 - DNA, 51 bp, Homo sapiens
  allele (26)...(0): single nucleotide polymorphism
  misc_feature (0)...(0): Accession number cg20612302
tggaggcggcccacatggcggccacggccatcctcaacctgtccacgcgct

SEQ ID NO: 467 - DNA, 51 bp, Homo sapiens
  allele (26)...(0): single nucleotide polymorphism
  misc_feature (0)...(0): Accession number cg43949162
gggccatgttaaccacttccttttgttgatcatctggttttaagaaaggat

SEQ ID NO: 468 - DNA, 51 bp, Homo sapiens
  allele (26)...(0): single nucleotide polymorphism
  misc_feature (0)...(0): Accession number cg43928442
catccacatgggccacggtgatgggaagcccaaaggctccgtatctgcagg

SEQ ID NO: 469 - DNA, 51 bp, Homo sapiens
  allele (26)...(0): single nucleotide polymorphism
  misc_feature (0)...(0): Accession number cg43976701
gacagctcattcgactgtgtcagaagtttggagaatatcataaagatgacc

SEQ ID NO: 470 - DNA, 51 bp, Homo sapiens
  allele (26)...(0): single nucleotide polymorphism
  misc_feature (0)...(0): Accession number cg44005525
cttgactgttaatattacaatgataaattcttgtccgaaatgtaacctttg

SEQ ID NO: 471 - DNA, 51 bp, Homo sapiens
  allele (26)...(0): single nucleotide polymorphism
  misc_feature (0)...(0): Accession number cg44005525
attctggtgtaaaagtgatatcgaggaagaatacaccaccctcatacacgg

SEQ ID NO: 472 - DNA, 51 bp, Homo sapiens
  allele (26)...(0): single nucleotide polymorphism
  misc_feature (0)...(0): Accession number cg44005525
gtgtaaaagtgatatcgagaaagaagacaccaccctcatacacggatcctg

SEQ ID NO: 473 - DNA, 51 bp, Homo sapiens
  allele (26)...(0): single nucleotide polymorphism
  misc_feature (0)...(0): Accession number cg44005525
gaaagaatacaccaccctcatacacagatcctggaggccctagaatggttg

SEQ ID NO: 474 - DNA, 51 bp, Homo sapiens
  allele (26)...(0): single nucleotide polymorphism
  misc_feature (0)...(0): Accession number cg44005525
cctcatacacggatcctggaggccccagaatggttgatctccattcataga

SEQ ID NO: 475 - DNA, 51 bp, Homo sapiens
  allele (26)...(0): single nucleotide polymorphism
  misc_feature (0)...(0): Accession number cg44005525
gaggccctagaatggttgatctccactcatagatgttatcgcctttgggac

SEQ ID NO: 476 - DNA, 51 bp, Homo sapiens
  allele (26)...(0): single nucleotide polymorphism
  misc_feature (0)...(0): Accession number cg44005525
tggttgatctccattcatagatgttgtcgcctttgggaccagcactgcaat

SEQ ID NO: 477 - DNA, 51 bp, Homo sapiens
  allele (26)...(0): single nucleotide polymorphism
  misc_feature (0)...(0): Accession number cg44005525
tatcgcctttgggaccagcactgcagttaggtggagggtctaaagtgatgt

SEQ ID NO: 478 - DNA, 51 bp, Homo sapiens
  allele (26)...(0): single nucleotide polymorphism
  misc_feature (0)...(0): Accession number cg44005525
tgttggtcatatactgagtggcaatgcttcccaccaaagggtcggcaggat

SEQ ID NO: 479 - DNA, 51 bp, Homo sapiens
  allele (26)...(0): single nucleotide polymorphism
  misc_feature (0)...(0): Accession number cg17663981
ccgagaacccgggcacagcgagagcgtggtgccaagtggcccaaaagttca

SEQ ID NO: 480 - DNA, 51 bp, Homo sapiens
  allele (26)...(0): single nucleotide polymorphism
  misc_feature (0)...(0): Accession number cg17663981
cgggcacagcgagagcctggtgccaggtggcccaaaagttcacgggcggca

SEQ ID NO: 481 - DNA, 51 bp, Homo sapiens
  allele (26)...(0): single nucleotide polymorphism
  misc_feature (0)...(0): Accession number cg42907760
aacctgaaggccaaagtgttgactcagactcggagagcacagtcagccccc

SEQ ID NO: 482 - DNA, 51 bp, Homo sapiens
  allele (26)...(0): single nucleotide polymorphism
  misc_feature (0)...(0): Accession number cg43301812
ctccatggctgggatgctctgctgcacttggttttgcccgagtggcagcct

SEQ ID NO: 483 - DNA, 51 bp, Homo sapiens
  allele (26)...(0): single nucleotide polymorphism
  misc_feature (0)...(0): Accession number cg43917756
agacactgaccactgggggaggtgcggagactgtgctggatgtggtggaaa

SEQ ID NO: 484 - DNA, 51 bp, Homo sapiens
  allele (26)...(0): single nucleotide polymorphism
  misc_feature (0)...(0): Accession number cg43918356
catcttcatctagaaacgccctcactgaaatggaattgctgccagacgtgg

SEQ ID NO: 485 - DNA, 51 bp, Homo sapiens
  allele (26)...(0): single nucleotide polymorphism
  misc_feature (0)...(0): Accession number cg43924089
ctgtggtcctctccacagacagggttcacatcaaactgggggtgtctccac

SEQ ID NO: 486 - DNA, 51 bp, Homo sapiens
  allele (26)...(0): single nucleotide polymorphism
  misc_feature (0)...(0): Accession number cg43926428
caaacttcatgagattgaagatctggagctgctgctccttgaacatgtctg

SEQ ID NO: 487 - DNA, 51 bp, Homo sapiens
  allele (26)...(0): single nucleotide polymorphism
  misc_feature (0)...(0): Accession number cg43950657
cctctacccatcggtcagtgtccccgccaccggggggctgctgggactctt

SEQ ID NO: 488 - DNA, 51 bp, Homo sapiens
  allele (26)...(0): single nucleotide polymorphism
  misc_feature (0)...(0): Accession number cg43955358
cccgacaattgtatctggcataaattccttcacccagtagattaggaatga

SEQ ID NO: 489 - DNA, 51 bp, Homo sapiens
  allele (26)...(0): single nucleotide polymorphism
  misc_feature (0)...(0): Accession number cg43970200
cattagagatctgggctgcaaggtctccaacataatcaataaacagatttt

SEQ ID NO: 490 - DNA, 51 bp, Homo sapiens
  allele (26)...(0): single nucleotide polymorphism
  misc_feature (0)...(0): Accession number cg43970200
ttaactgtggtatacagtcagtgtacgcaaacattgatttaaagcggtcat

SEQ ID NO: 491 - DNA, 51 bp, Homo sapiens
  allele (26)...(0): single nucleotide polymorphism
  misc_feature (0)...(0): Accession number cg43999667
gtacagcctggtaatggagaatcaagttttgctgtatcgtaaaggcagcaa

SEQ ID NO: 492 - DNA, 51 bp, Homo sapiens
  allele (26)...(0): single nucleotide polymorphism
  misc_feature (0)...(0): Accession number cg44009187
tcaacttgctccagtaggccgccggttctgcaggcagctcgggctggaaga

SEQ ID NO: 493 - DNA, 51 bp, Homo sapiens
  allele (26)...(0): single nucleotide polymorphism
  misc_feature (0)...(0): Accession number cg44020180
atgggtagactcgagtttggtaaatatccaaaccataggccacaaccaaac

SEQ ID NO: 494 - DNA, 51 bp, Homo sapiens
  allele (26)...(0): single nucleotide polymorphism
  misc_feature (0)...(0): Accession number cg44020180
tagactcgagtttggtaaatgtccagaccataggccacaaccaaacaagtg

SEQ ID NO: 495 - DNA, 51 bp, Homo sapiens
  allele (26)...(0): single nucleotide polymorphism
  misc_feature (0)...(0): Accession number cg44020180
ccaaaccataggccacaaccaaacatgtggactccagacccgagggagctg

SEQ ID NO: 496 - DNA, 51 bp, Homo sapiens
  allele (26)...(0): single nucleotide polymorphism
  misc_feature (0)...(0): Accession number cg44020180
ccacaaccaaacaagtggactccaggcccgagggagctgtgtagatacctc

SEQ ID NO: 497 - DNA, 51 bp, Homo sapiens
  allele (26)...(0): single nucleotide polymorphism
  misc_feature (0)...(0): Accession number cg44020180
aacaagtggactccagacccgagggcgctgtgtagatacctcgcattcgag

SEQ ID NO: 498 - DNA, 51 bp, Homo sapiens
  allele (26)...(0): single nucleotide polymorphism
  misc_feature (0)...(0): Accession number cg44020180
tggactccagacccgagggagctgtatagatacctcgcattcgagaaactg

SEQ ID NO: 499 - DNA, 51 bp, Homo sapiens
  allele (26)...(0): single nucleotide polymorphism
  misc_feature (0)...(0): Accession number cg44020180
ccagacccgagggagctgtgtagatgcctcgcattcgagaaactgtctggt

SEQ ID NO: 500 - DNA, 51 bp, Homo sapiens
  allele (26)...(0): single nucleotide polymorphism
  misc_feature (0)...(0): Accession number cg44020180
ctgtgtagatacctcgcattcgagagactgtctggttatagttgatgaatc

SEQ ID NO: 501 - DNA, 51 bp, Homo sapiens
  allele (26)...(0): single nucleotide polymorphism
  misc_feature (0)...(0): Accession number cg44020180
tgatgaatcgctctgcgtgtatctggacatctggagaatacgggattaagt

SEQ ID NO: 502 - DNA, 51 bp, Homo sapiens
  allele (26)...(0): single nucleotide polymorphism
  misc_feature (0)...(0): Accession number cg44020180
gctctgcgtgtatctgtacatctggggaatacgggattaagttctcctctc

SEQ ID NO: 503 - DNA, 51 bp, Homo sapiens
  allele (26)...(0): single nucleotide polymorphism
  misc_feature (0)...(0): Accession number cg44020180
tgtacatctggagaatacgggattaggttctcctctctgctttgttctgtt

SEQ ID NO: 504 - DNA, 51 bp, Homo sapiens
  allele (26)...(0): single nucleotide polymorphism
  misc_feature (0)...(0): Accession number cg44020180
ctggagaatacgggattaagttctcttctctgctttgttctgttgggatct

SEQ ID NO: 505 - DNA, 51 bp, Homo sapiens
  allele (26)...(0): single nucleotide polymorphism
  misc_feature (0)...(0): Accession number cg44928323
agcaggcagatagaagttcctgtcattttctccttttttacggggtaggat

SEQ ID NO: 506 - DNA, 51 bp, Homo sapiens
  allele (26)...(0): single nucleotide polymorphism
  misc_feature (0)...(0): Accession number cg44932392
tgtcttggtttttgataaaattgttaaacttattgttgagatcagcgctga

SEQ ID NO: 507 - DNA, 51 bp, Homo sapiens
  allele (26)...(0): single nucleotide polymorphism
  misc_feature (0)...(0): Accession number cg43991434
tcttgagcagacccatgtgcacgagcagcctggtgaggaaggtgttggagt

SEQ ID NO: 508 - DNA, 51 bp, Homo sapiens
  allele (26)...(0): single nucleotide polymorphism
  misc_feature (0)...(0): Accession number cg43985955
gcatgataggatatggaattcctcctcaaatgggaagtgttcctgtaatga

SEQ ID NO: 509 - DNA, 51 bp, Homo sapiens
  allele (26)...(0): single nucleotide polymorphism
  misc_feature (0)...(0): Accession number cg43985955
gaattcctccacaaatgggaagtgtacctgtaatgacgcaaccaaccttaa

SEQ ID NO: 510 - DNA, 51 bp, Homo sapiens
  allele (26)...(0): single nucleotide polymorphism
  misc_feature (0)...(0): Accession number cg43985955
aaatgggaagtgttcctgtaatgacacaaccaaccttaatatacagccagc

SEQ ID NO: 511 - DNA, 51 bp, Homo sapiens
  allele (26)...(0): single nucleotide polymorphism
  misc_feature (0)...(0): Accession number cg43985955
tatacagccagcctgtcatgagaccgccaaacccctttggccctgtatcag

SEQ ID NO: 512 - DNA, 51 bp, Homo sapiens
  allele (26)...(0): single nucleotide polymorphism
  misc_feature (0)...(0): Accession number cg44031765
acctcgccgtagtagatgtagcgcaacatggactcgaaggcctgcctgctg

SEQ ID NO: 513 - DNA, 51 bp, Homo sapiens
  allele (26)...(0): single nucleotide polymorphism
  misc_feature (0)...(0): Accession number cg43252100
tgcagcccagaggttctttttactcaatggtaccaaatgcaactattcacc

SEQ ID NO: 514 - DNA, 51 bp, Homo sapiens
  allele (26)...(0): single nucleotide polymorphism
  misc_feature (0)...(0): Accession number cg43934178
cgatgccatgcttctccatgagcgtaatgagctcggcctccgtcaggtagt

SEQ ID NO: 515 - DNA, 51 bp, Homo sapiens
  allele (26)...(0): single nucleotide polymorphism
  misc_feature (0)...(0): Accession number cg43031103
acatggccctccccttggttgaggaaacagcaggggctggtgtgaggtgca

SEQ ID NO: 516 - DNA, 51 bp, Homo sapiens
  allele (26)...(0): single nucleotide polymorphism
  misc_feature (0)...(0): Accession number cg43258841
taaatcttgtgtggccatcatccagggtgtggaacatttcaccgtcatctt

SEQ ID NO: 517 - DNA, 51 bp, Homo sapiens
  allele (26)...(0): single nucleotide polymorphism
  misc_feature (0)...(0): Accession number cg43258841
catccagtgtgtggaacatttcaccatcatcttctactggtataatttgaa

SEQ ID NO: 518 - DNA, 51 bp, Homo sapiens
  allele (26)...(0): single nucleotide polymorphism
  misc_feature (0)...(0): Accession number cg43258841
ggaacatttcaccgtcatcttctacgggtataatttgaaagtgctttattt

SEQ ID NO: 519 - DNA, 51 bp, Homo sapiens
  allele (26)...(0): single nucleotide polymorphism
  misc_feature (0)...(0): Accession number cg43258841
cttctactggtataatttgaaagtgttttattttttgtccatgactcattg

SEQ ID NO: 520 - DNA, 51 bp, Homo sapiens
  allele (26)...(0): single nucleotide polymorphism
  misc_feature (0)...(0): Accession number cg43258841
ctggtataatttgaaagtgctttatcttttgtccatgactcattgacagta

SEQ ID NO: 521 - DNA, 51 bp, Homo sapiens
  allele (26)...(0): single nucleotide polymorphism
  misc_feature (0)...(0): Accession number cg43258841
tttgaaagtgctttattttttgtccgtgactcattgacagtacgaaagttt

SEQ ID NO: 522 - DNA, 51 bp, Homo sapiens
  allele (26)...(0): single nucleotide polymorphism
  misc_feature (0)...(0): Accession number cg43258841
tttgtccatgactcattgacagtacaaaagttttggggttactctgactat

SEQ ID NO: 523 - DNA, 51 bp, Homo sapiens
  allele (26)...(0): single nucleotide polymorphism
  misc_feature (0)...(0): Accession number cg43258841
aaactccatccacaagtccttgctggataatcaatcgctgagcctcatctc

SEQ ID NO: 524 - DNA, 51 bp, Homo sapiens
  allele (26)...(0): single nucleotide polymorphism
  misc_feature (0)...(0): Accession number cg43258841
ccacaagtccttgctgaataatcaaccgctgagcctcatctctagaaattt

SEQ ID NO: 525 - DNA, 51 bp, Homo sapiens
  allele (26)...(0): single nucleotide polymorphism
  misc_feature (0)...(0): Accession number cg43971614
tcactttcctgtggatttctttctgcccgtagactgcatctgctggctttc

SEQ ID NO: 526 - DNA, 51 bp, Homo sapiens
  allele (26)...(0): single nucleotide polymorphism
  misc_feature (0)...(0): Accession number cg43971614
gctttccatttgaatccaatcccccgtggacataagaagagttctttccat

SEQ ID NO: 527 - DNA, 51 bp, Homo sapiens
  allele (26)...(0): single nucleotide polymorphism
  misc_feature (0)...(0): Accession number cg43320405
tgttcttcaggcccttcaccatggagggcaggagggccttcaccttggcgg

SEQ ID NO: 528 - DNA, 51 bp, Homo sapiens
  allele (26)...(0): single nucleotide polymorphism
  misc_feature (0)...(0): Accession number cg43922856
ttactggaccatctatacgaaaatgctctgaagtttccacccttttccttg

SEQ ID NO: 529 - DNA, 51 bp, Homo sapiens
  allele (26)...(0): single nucleotide polymorphism
  misc_feature (0)...(0): Accession number cg43922856
gagttcttcttgaccctcttgtagactccctagttaatgcctgcagaggtc

SEQ ID NO: 530 - DNA, 51 bp, Homo sapiens
  allele (26)...(0): single nucleotide polymorphism
  misc_feature (0)...(0): Accession number cg43991007
caagagaacagcaagtgcaccaaacctagctgaaacagaaaaagagacagc

SEQ ID NO: 531 - DNA, 51 bp, Homo sapiens
  allele (26)...(0): single nucleotide polymorphism
  misc_feature (0)...(0): Accession number cg43940463
ggctcaccagctccagctgcgtgtgctcatccaccaccagcgtgtacttga

SEQ ID NO: 532 - DNA, 51 bp, Homo sapiens
  allele (26)...(0): single nucleotide polymorphism
  misc_feature (0)...(0): Accession number cg42676981
ggaagtagaggtcaggtggggctgtagggctcttcaggttcaaacaccgga

SEQ ID NO: 533 - DNA, 51 bp, Homo sapiens
  allele (26)...(0): single nucleotide polymorphism
  misc_feature (0)...(0): Accession number cg43918561
ggaaggaggtctacaccacgctgaaaggcctctacgccacgcacgcctgcg

SEQ ID NO: 534 - DNA, 51 bp, Homo sapiens
  allele (26)...(0): single nucleotide polymorphism
  misc_feature (0)...(0): Accession number cg43999712
acgtaccaaatgaaatgctctacggccgaataggctacatctatgctctgc

SEQ ID NO: 535 - DNA, 51 bp, Homo sapiens
  allele (26)...(0): single nucleotide polymorphism
  misc_feature (0)...(0): Accession number cg43999712
taccaaatgaaatgctctacgggcgcataggctacatctatgctctgcttt

SEQ ID NO: 536 - DNA, 51 bp, Homo sapiens
  allele (26)...(0): single nucleotide polymorphism
  misc_feature (0)...(0): Accession number cg43999712
gccatattcagcagatttgtgaaaccattttaacctctggagaaaacctat

SEQ ID NO: 537 - DNA, 51 bp, Homo sapiens
  allele (26)...(0): single nucleotide polymorphism
  misc_feature (0)...(0): Accession number cg43922139
acttgactttccagacacggtgagggaggaggaggctgtcgggaccaaacg

SEQ ID NO: 538 - DNA, 51 bp, Homo sapiens
  allele (26)...(0): single nucleotide polymorphism
  misc_feature (0)...(0): Accession number cg43955639
caggcatggtgatgaggggtgctggtgccagggaggtggcaggagctggca

SEQ ID NO: 539 - DNA, 51 bp, Homo sapiens
  allele (26)...(0): single nucleotide polymorphism
  misc_feature (0)...(0): Accession number cg41022625
gcctggccattgtcatcttcttctccgtgctgggcgtggtctttggcaaag

SEQ ID NO: 540 - DNA, 51 bp, Homo sapiens
  allele (26)...(0): single nucleotide polymorphism
  misc_feature (0)...(0): Accession number cg41022625
tggtctttggcaaagggaacacggccttctggatcgtcttctccatcattc

SEQ ID NO: 541 - DNA, 51 bp, Homo sapiens
  allele (26)...(0): single nucleotide polymorphism
  misc_feature (0)...(0): Accession number cg41022625
gcaaagggaacacggcgttctggattgtcttctccatcattcacatcatcg

SEQ ID NO: 542 - DNA, 51 bp, Homo sapiens
  allele (26)...(0): single nucleotide polymorphism
  misc_feature (0)...(0): Accession number cg44002669
ccttgcgcttgcactcgcggcagcctctgtccagttcctccttctccttct

SEQ ID NO: 543 - DNA, 51 bp, Homo sapiens
  allele (26)...(0): single nucleotide polymorphism
  misc_feature (0)...(0): Accession number cg43302693
gccccacctgagtgacaatgatgtacttgaccccaccgggggtcggctcca

SEQ ID NO: 544 - DNA, 51 bp, Homo sapiens
  allele (26)...(0): single nucleotide polymorphism
  misc_feature (0)...(0): Accession number cg43921081
acttggaaagaaagtatgcagcgctgtaccagcctctctttgacaagagaa

SEQ ID NO: 545 - DNA, 51 bp, Homo sapiens
  allele (26)...(0): single nucleotide polymorphism
  misc_feature (0)...(0): Accession number cg42181143
cacaccagcgcttctgccactccgacccaaagaaactatgatctttgcttt

SEQ ID NO: 546 - DNA, 51 bp, Homo sapiens
  allele (26)...(0): single nucleotide polymorphism
  misc_feature (0)...(0): Accession number cg43918701
ttttccagatgcgacagacatcattcgggcatattctagaaaccaagggca

SEQ ID NO: 547 - DNA, 51 bp, Homo sapiens
  allele (26)...(0): single nucleotide polymorphism
  misc_feature (0)...(0): Accession number cg43926685
agaattccttactggatcaccgcaataagaccatccacaacgattaccgca

SEQ ID NO: 548 - DNA, 51 bp, Homo sapiens
  allele (26)...(0): single nucleotide polymorphism
  misc_feature (0)...(0): Accession number cg44927654
gtgccagcttctccatggtggcatctgtcaggatgctggggtagggaggtt

SEQ ID NO: 549 - DNA, 51 bp, Homo sapiens
  allele (26)...(0): single nucleotide polymorphism
  misc_feature (0)...(0): Accession number cg43993462
ccaactcattgacagtgaggggtgcatctccacttctgttggtgtaattga

SEQ ID NO: 550 - DNA, 51 bp, Homo sapiens
  allele (26)...(0): single nucleotide polymorphism
  misc_feature (0)...(0): Accession number cg44010310
ctatattctctgattgtgcaaagtataggacattatattcgacatctttgg

SEQ ID NO: 551 - DNA, 51 bp, Homo sapiens
  allele (26)...(0): single nucleotide polymorphism
  misc_feature (0)...(0): Accession number cg43950590
ggtgcaccatgtacagctgcccaatttgagagaagaatcctccgacggctt

SEQ ID NO: 552 - DNA, 51 bp, Homo sapiens
  allele (26)...(0): single nucleotide polymorphism
  misc_feature (0)...(0): Accession number cg43950590
gctgcccaatctgagagaagaatcccccgacggcttcgttaccatcctgtc

SEQ ID NO: 553 - DNA, 51 bp, Homo sapiens
  allele (26)...(0): single nucleotide polymorphism
  misc_feature (0)...(0): Accession number cg43950590
cgacggcttcgttaccatcctgtctaaagcggattgcacgagcccagtaat

SEQ ID NO: 554 - DNA, 51 bp, Homo sapiens
  allele (26)...(0): single nucleotide polymorphism
  misc_feature (0)...(0): Accession number cg43950590
cgttaccatcctgtctgaagcggatggcacgagcccagtaattgccccatt

SEQ ID NO: 555 - DNA, 51 bp, Homo sapiens
  allele (26)...(0): single nucleotide polymorphism
  misc_feature (0)...(0): Accession number cg43950590
catcctgtctgaagcggattgcacgggcccagtaattgccccattcaatca

SEQ ID NO: 556 - DNA, 51 bp, Homo sapiens
  allele (26)...(0): single nucleotide polymorphism
  misc_feature (0)...(0): Accession number cg43950590
cacgagcccagtaattgccccattcgatcatggttcctggtcggagttggt

SEQ ID NO: 557 - DNA, 51 bp, Homo sapiens
  allele (26)...(0): single nucleotide polymorphism
  misc_feature (0)...(0): Accession number cg43950590
gtcggagttggtaagacctgagttcgtatatattaggtccggatcttggca

SEQ ID NO: 558 - DNA, 51 bp, Homo sapiens
  allele (26)...(0): single nucleotide polymorphism
  misc_feature (0)...(0): Accession number cg43950590
ggtaagacctgagttcatatatattgggtccggatcttggcacaggctcat

SEQ ID NO: 559 - DNA, 51 bp, Homo sapiens
  allele (26)...(0): single nucleotide polymorphism
  misc_feature (0)...(0): Accession number cg43951092
gagtagaattcaagaagagttcaatgtatcgatgttgcatgttatttttat

SEQ ID NO: 560 - DNA, 51 bp, Homo sapiens
  allele (26)...(0): single nucleotide polymorphism
  misc_feature (0)...(0): Accession number cg43951092
tatttttatctttagacatggcagccactgcatcttcatgtgtcacaaact

SEQ ID NO: 561 - DNA, 51 bp, Homo sapiens
  allele (26)...(0): single nucleotide polymorphism
  misc_feature (0)...(0): Accession number cg43951092
ctgcttctcctgtggctctgccatcggctccaatatcaatatgaactcgta

SEQ ID NO: 562 - DNA, 51 bp, Homo sapiens
  allele (26)...(0): single nucleotide polymorphism
  misc_feature (0)...(0): Accession number cg43951092
catcagctccaatatcaatatgaacgcgtattggatttagtggtgagaaga

SEQ ID NO: 563 - DNA, 51 bp, Homo sapiens
  allele (26)...(0): single nucleotide polymorphism
  misc_feature (0)...(0): Accession number cg43951092
tatcaatatgaactcgtattggattgagtggtgagaagaaattagcaatgt

SEQ ID NO: 564 - DNA, 51 bp, Homo sapiens
  allele (26)...(0): single nucleotide polymorphism
  misc_feature (0)...(0): Accession number cg43951092
ttagtggtgagaagaaattagcaatatcattttcagttgcacgaaaaggca

SEQ ID NO: 565 - DNA, 51 bp, Homo sapiens
  allele (26)...(0): single nucleotide polymorphism
  misc_feature (0)...(0): Accession number cg43990820
catcagtttccacttcgacacatcgatagtcctcacagccacggccatcca

SEQ ID NO: 566 - DNA, 51 bp, Homo sapiens
  allele (26)...(0): single nucleotide polymorphism
  misc_feature (0)...(0): Accession number cg43990820
tcgacccctcttcatcctccaaaacccgaacccttggtatccttgtattga

SEQ ID NO: 567 - DNA, 51 bp, Homo sapiens
  allele (26)...(0): single nucleotide polymorphism
  misc_feature (0)...(0): Accession number cg43986914
tcaggaaaaggaagcatgacaattttccacataaccaaagaagagaaggga

SEQ ID NO: 568 - DNA, 51 bp, Homo sapiens
  allele (26)...(0): single nucleotide polymorphism
  misc_feature (0)...(0): Accession number cg43119818
aagaaattatcaatgtggggcattccttccatgtaaattttgaggacaacg

SEQ ID NO: 569 - DNA, 51 bp, Homo sapiens
  allele (26)...(0): single nucleotide polymorphism
  misc_feature (0)...(0): Accession number cg44027444
cagtgccagagtccaggaactgaacgtcaagagcccggctgctgtgaacat

SEQ ID NO: 570 - DNA, 51 bp, Homo sapiens
  allele (26)...(0): single nucleotide polymorphism
  misc_feature (0)...(0): Accession number cg29351416
ccacacaggacactgtggtggccctcgatgctctgtccaaatacggagcag

SEQ ID NO: 571 - DNA, 51 bp, Homo sapiens
  allele (26)...(0): single nucleotide polymorphism
  misc_feature (0)...(0): Accession number cg29351416
aggacactgtggtggcccttgatgccctgtccaaatacggagcagctactt

SEQ ID NO: 572 - DNA, 51 bp, Homo sapiens
  allele (26)...(0): single nucleotide polymorphism
  misc_feature (0)...(0): Accession number cg29351416
agttccaagtagacaacagtaatcgtctgttactgcagcaggtctcattac

SEQ ID NO: 573 - DNA, 51 bp, Homo sapiens
  allele (26)...(0): single nucleotide polymorphism
  misc_feature (0)...(0): Accession number cg29351416
tgtatgctcagaccacgctgagatataacatgcccttggagaagcagcagc

SEQ ID NO: 574 - DNA, 51 bp, Homo sapiens
  allele (26)...(0): single nucleotide polymorphism
  misc_feature (0)...(0): Accession number cg29351416
atgctcagaccacgctgagatacaatatgcccttggagaagcagcagcctg

SEQ ID NO: 575 - DNA, 51 bp, Homo sapiens
  allele (26)...(0): single nucleotide polymorphism
  misc_feature (0)...(0): Accession number cg43950273
ggtcttcaataaagtagttatggcaagtcctgatccacatagatagctgaa

SEQ ID NO: 576 - DNA, 51 bp, Homo sapiens
  allele (26)...(0): single nucleotide polymorphism
  misc_feature (0)...(0): Accession number cg44930828
tcaacacaaggcagccacaggccaagatcattgtattgggtttgttacctc

SEQ ID NO: 577 - DNA, 51 bp, Homo sapiens
  allele (26)...(0): single nucleotide polymorphism
  misc_feature (0)...(0): Accession number cg44930828
ggcagccacaggccaaaatcattgtgttgggtttgttacctcgaggtgaga

SEQ ID NO: 578 - DNA, 51 bp, Homo sapiens
  allele (26)...(0): single nucleotide polymorphism
  misc_feature (0)...(0): Accession number cg44930828
tgggtttgttacctcgaggtgagaagcccaatcctttgaggcaaaagaacg

SEQ ID NO: 579 - DNA, 51 bp, Homo sapiens
  allele (26)...(0): single nucleotide polymorphism
  misc_feature (0)...(0): Accession number cg44930828
tgttacctcgaggtgagaaacccaaccctttgaggcaaaagaacgccaagg

SEQ ID NO: 580 - DNA, 51 bp, Homo sapiens
  allele (26)...(0): single nucleotide polymorphism
  misc_feature (0)...(0): Accession number cg44930828
ctcgaggtgagaaacccaatcctttaaggcaaaagaacgccaaggtgaacc

SEQ ID NO: 581 - DNA, 51 bp, Homo sapiens
  allele (26)...(0): single nucleotide polymorphism
  misc_feature (0)...(0): Accession number cg44930828
aacccaatcctttgaggcaaaagaatgccaaggtgaaccaactcctcaagg

SEQ ID NO: 582 - DNA, 51 bp, Homo sapiens
  allele (26)...(0): single nucleotide polymorphism
  misc_feature (0)...(0): Accession number cg44930828
ggcaaaagaacgccaaggtgaaccagctcctcaaggtttcgctgccgaagc

SEQ ID NO: 583 - DNA, 51 bp, Homo sapiens
  allele (26)...(0): single nucleotide polymorphism
  misc_feature (0)...(0): Accession number cg44930828
aggtgaaccaactcctcaaggtttccctgccgaagcttgccaacgtgcagc

SEQ ID NO: 584 - DNA, 51 bp, Homo sapiens
  allele (26)...(0): single nucleotide polymorphism
  misc_feature (0)...(0): Accession number cg44930828
aggtttcgctgccgaagcttgccaatgtgcagctcctggataccgacgggg

SEQ ID NO: 585 - DNA, 51 bp, Homo sapiens
  allele (26)...(0): single nucleotide polymorphism
  misc_feature (0)...(0): Accession number cg44930828
tgcagctcctggataccgacgggggctttgtgcactcggacggtgccatct

SEQ ID NO: 586 - DNA, 51 bp, Homo sapiens
  allele (26)...(0): single nucleotide polymorphism
  misc_feature (0)...(0): Accession number cg44930828
agctcctggataccgacgggggtttcgtgcactcggacggtgccatctcct

SEQ ID NO: 587 - DNA, 51 bp, Homo sapiens
  allele (26)...(0): single nucleotide polymorphism
  misc_feature (0)...(0): Accession number cg43975478
aaaaccctgagaaaagatacaatgttctgggagctgagactgtgctcaatc

SEQ ID NO: 588 - DNA, 51 bp, Homo sapiens
  allele (26)...(0): single nucleotide polymorphism
  misc_feature (0)...(0): Accession number cg42530218
gcatgcccagtaataaagatgaagacgggctagtggttttagttttcaaca

SEQ ID NO: 589 - DNA, 51 bp, Homo sapiens
  allele (26)...(0): single nucleotide polymorphism
  misc_feature (0)...(0): Accession number cg43122111
agtggtggatccccaggaggaggagagaaggcgggcaggtggcggggcaga

SEQ ID NO: 590 - DNA, 51 bp, Homo sapiens
  allele (26)...(0): single nucleotide polymorphism
  misc_feature (0)...(0): Accession number cg43986282
cttttggcccatacttctttccgtaacaggatttgcagtagatctcttcat

SEQ ID NO: 591 - DNA, 51 bp, Homo sapiens
  allele (26)...(0): single nucleotide polymorphism
  misc_feature (0)...(0): Accession number cg43986282
aggatttgcagtagatctcttcatcatgaattgccactgttgtgctatcta

SEQ ID NO: 592 - DNA, 51 bp, Homo sapiens
  allele (26)...(0): single nucleotide polymorphism
  misc_feature (0)...(0): Accession number cg43986282
catcgtgaattgccactgttgtgctgtctaaatttttcctgcaaaccatgc

SEQ ID NO: 593 - DNA, 51 bp, Homo sapiens
  allele (26)...(0): single nucleotide polymorphism
  misc_feature (0)...(0): Accession number cg43986282
ctaaatttttcctgcaaaccatgcacagaaagcagcagcggtggaagctcc

SEQ ID NO: 594 - DNA, 51 bp, Homo sapiens
  allele (26)...(0): single nucleotide polymorphism
  misc_feature (0)...(0): Accession number cg43986282
agaaagcagcagcggtggaagctccggccatcacactgcacctcttctgcg

SEQ ID NO: 595 - DNA, 51 bp, Homo sapiens
  allele (26)...(0): single nucleotide polymorphism
  misc_feature (0)...(0): Accession number cg43986282
tcctgccatcacactgcacctcttcagcgtggtacacggtcctcccacagg

SEQ ID NO: 596 - DNA, 51 bp, Homo sapiens
  allele (26)...(0): single nucleotide polymorphism
  misc_feature (0)...(0): Accession number cg43986282
gcacctcttctgcgtggtacacggttctcccacaggccccacacttgtttc

SEQ ID NO: 597 - DNA, 51 bp, Homo sapiens
  allele (26)...(0): single nucleotide polymorphism
  misc_feature (0)...(0): Accession number cg43986282
cttctgcgtggtacacggtcctcccgcaggccccacacttgtttccacctc

SEQ ID NO: 598 - DNA, 51 bp, Homo sapiens
  allele (26)...(0): single nucleotide polymorphism
  misc_feature (0)...(0): Accession number cg43986282
ggtacacggtcctcccacaggccccgcacttgtttccacctccccagacag

SEQ ID NO: 599 - DNA, 51 bp, Homo sapiens
  allele (26)...(0): single nucleotide polymorphism
  misc_feature (0)...(0): Accession number cg43986282
cggtcctcccacaggccccacacttatttccacctccccagacaggcattc

SEQ ID NO: 600 - DNA, 51 bp, Homo sapiens
  allele (26)...(0): single nucleotide polymorphism
  misc_feature (0)...(0): Accession number cg42723058
gtcccctaccaccaccggtcacagacgtgagccttgagttgcagcagctgc

SEQ ID NO: 601 - DNA, 51 bp, Homo sapiens
  allele (26)...(0): single nucleotide polymorphism
  misc_feature (0)...(0): Accession number cg42723058
agatgtgagccttgagttgcagcagttgcgggaagaacggaaccgcctgga

SEQ ID NO: 602 - DNA, 51 bp, Homo sapiens
  allele (26)...(0): single nucleotide polymorphism
  misc_feature (0)...(0): Accession number cg43981269
agatggctggccagatgggcatgtttaaccccatggccatccctttcgggg

SEQ ID NO: 603 - DNA, 51 bp, Homo sapiens
  allele (26)...(0): single nucleotide polymorphism
  misc_feature (0)...(0): Accession number cg43972159
taggttctcgggctgctgaactgttagattttgacttttctttctccttgc

SEQ ID NO: 604 - DNA, 51 bp, Homo sapiens
  allele (26)...(0): single nucleotide polymorphism
  misc_feature (0)...(0): Accession number cg43972159
gggctgctgaactgttcgattttgatttttctttctccttgctgtctgtca

SEQ ID NO: 605 - DNA, 51 bp, Homo sapiens
  allele (26)...(0): single nucleotide polymorphism
  misc_feature (0)...(0): Accession number cg43972159
ctttctccttgctgtctgtcacaggcacccacttaaatatcctcagggacg

SEQ ID NO: 606 - DNA, 51 bp, Homo sapiens
  allele (26)...(0): single nucleotide polymorphism
  misc_feature (0)...(0): Accession number cg43972159
ccttgctgtctgtcacaggaacccatttaaatatcctcagggacgtgtcac

SEQ ID NO: 607 - DNA, 51 bp, Homo sapiens
  allele (26)...(0): single nucleotide polymorphism
  misc_feature (0)...(0): Accession number cg43972159
gggacgtgtcacccacagtcacccatttcttctcccatttccgcactttct

SEQ ID NO: 608 - DNA, 51 bp, Homo sapiens
  allele (26)...(0): single nucleotide polymorphism
  misc_feature (0)...(0): Accession number cg43972159
ccgccatcaccttcttgatgtcatctttggcccggctacgggtctcggccc

SEQ ID NO: 609 - DNA, 51 bp, Homo sapiens
  allele (26)...(0): single nucleotide polymorphism
  misc_feature (0)...(0): Accession number cg44911139
gcaaggttcgcgatgtacgtatcatttcagatcggaactcacgtcgttcta

SEQ ID NO: 610 - DNA, 51 bp, Homo sapiens
  allele (26)...(0): single nucleotide polymorphism
  misc_feature (0)...(0): Accession number cg42539705
aaacggaactatttccagatgaggcagggtgtctgggaggggctgtgggtg

SEQ ID NO: 611 - DNA, 51 bp, Homo sapiens
  allele (26)...(0): single nucleotide polymorphism
  misc_feature (0)...(0): Accession number cg42028329
ccaaggagaacccgtgcagaaaatttcaggccaacatcttcaacaagagca

SEQ ID NO: 612 - DNA, 51 bp, Homo sapiens
  allele (26)...(0): single nucleotide polymorphism
  misc_feature (0)...(0): Accession number cg42028329
actttgacaacccagtacaccggtcacggaaatggcagcgacggttcttca

SEQ ID NO: 613 - DNA, 51 bp, Homo sapiens
  allele (26)...(0): single nucleotide polymorphism
  misc_feature (0)...(0): Accession number cg42028329
accggtctcggaaatggcagcgacgattcttcatcctttacgagcacggcc

SEQ ID NO: 614 - DNA, 51 bp, Homo sapiens
  allele (26)...(0): single nucleotide polymorphism
  misc_feature (0)...(0): Accession number cg42028329
ggcagcgacggttcttcatcctttatgagcacggcctcttgcgctacgccc

SEQ ID NO: 615 - DNA, 51 bp, Homo sapiens
  allele (26)...(0): single nucleotide polymorphism
  misc_feature (0)...(0): Accession number cg42028329
gacggttcttcatcctttacgagcatggcctcttgcgctacgccctggatg

SEQ ID NO: 616 - DNA, 51 bp, Homo sapiens
  allele (26)...(0): single nucleotide polymorphism
  misc_feature (0)...(0): Accession number cg42028329
tcctttacgagcacggcctcttgcgatacgccctggatgagatgcccacga

SEQ ID NO: 617 - DNA, 51 bp, Homo sapiens
  allele (26)...(0): single nucleotide polymorphism
  misc_feature (0)...(0): Accession number cg42028329
gctacgccctggatgagatgcccaccacccttcctcagggcaccatcaaca

SEQ ID NO: 618 - DNA, 51 bp, Homo sapiens
  allele (26)...(0): single nucleotide polymorphism
  misc_feature (0)...(0): Accession number cg42392719
tcgcgagaacggcctcagtgccaagtcccttacccctgcagctgggctctg

SEQ ID NO: 619 - DNA, 51 bp, Homo sapiens
  allele (26)...(0): single nucleotide polymorphism
  misc_feature (0)...(0): Accession number cg42392719
tctcccccaaggtggggtcttctaggtctgtgaggaagaggttcacatctc

SEQ ID NO: 620 - DNA, 51 bp, Homo sapiens
  allele (26)...(0): single nucleotide polymorphism
  misc_feature (0)...(0): Accession number cg42392719
ctagatctgtgaggaagaggttcacgtctcccaccatgcagctctcttcag

SEQ ID NO: 621 - DNA, 51 bp, Homo sapiens
  allele (26)...(0): single nucleotide polymorphism
  misc_feature (0)...(0): Accession number cg39512856
acgcgtcgccggaagccacgtcataaacggttttaccccgatggtcttcaa

SEQ ID NO: 622 - DNA, 51 bp, Homo sapiens
  allele (26)...(0): single nucleotide polymorphism
  misc_feature (0)...(0): Accession number cg39512856
cgtcatagacggttttaccccgatgatcttcaacgagatgccacgatgcct

SEQ ID NO: 623 - DNA, 51 bp, Homo sapiens
  allele (26)...(0): single nucleotide polymorphism
  misc_feature (0)...(0): Accession number cg39512856
cctcatcactgttgaaaacagccacgaagccagccggaatatctggcggtg

SEQ ID NO: 624 - DNA, 51 bp, Homo sapiens
  allele (26)...(0): single nucleotide polymorphism
  misc_feature (0)...(0): Accession number cg39512856
agccagccggaatatctggcggtgcgatatcggtactgtttgcaggcagac

SEQ ID NO: 625 - DNA, 51 bp, Homo sapiens
  allele (26)...(0): single nucleotide polymorphism
  misc_feature (0)...(0): Accession number cg39512856
gcggtgcaatatcggtactgtttgctggcagaccggtatgaggcggaatat

SEQ ID NO: 626 - DNA, 51 bp, Homo sapiens
  allele (26)...(0): single nucleotide polymorphism
  misc_feature (0)...(0): Accession number cg39512856
tatcggtactgtttgcaggcagacctgtatgaggcggaatatatgcgtcac

SEQ ID NO: 627 - DNA, 51 bp, Homo sapiens
  allele (26)...(0): single nucleotide polymorphism
  misc_feature (0)...(0): Accession number cg37445474
ccctgcaagctctgtatggaacgattccccagatctttgggaaaggagaat

SEQ ID NO: 628 - DNA, 51 bp, Homo sapiens
  allele (26)...(0): single nucleotide polymorphism
  misc_feature (0)...(0): Accession number cg30791729
cagatccagtggccttcccccagctttgtcaactgtgtccaggctgtggct

SEQ ID NO: 629 - DNA, 51 bp, Homo sapiens
  allele (26)...(0): single nucleotide polymorphism
  misc_feature (0)...(0): Accession number cg42522690
gtgaacagtgtaaatcagtttttcactgggacatgaaatccaaggataagg

SEQ ID NO: 630 - DNA, 51 bp, Homo sapiens
  allele (26)...(0): single nucleotide polymorphism
  misc_feature (0)...(0): Accession number cg42522690
ctcgaaagtctcttggtgaggaatacacagaagactatgagcaacccaggg

SEQ ID NO: 631 - DNA, 51 bp, Homo sapiens
  allele (26)...(0): single nucleotide polymorphism
  misc_feature (0)...(0): Accession number cg43982164
aggtctacgtgttgaagcgtcctcacgtggatgagttcctgcagcgaatgg

SEQ ID NO: 632 - DNA, 51 bp, Homo sapiens
  allele (26)...(0): single nucleotide polymorphism
  misc_feature (0)...(0): Accession number cg43980889
aagaccatttacaagtagaaaatgacgcttaccctggtaccgatagaacag

SEQ ID NO: 633 - DNA, 51 bp, Homo sapiens
  allele (26)...(0): single nucleotide polymorphism
  misc_feature (0)...(0): Accession number cg43980889
tagaaaatgatgcttaccctggtactgatagaacagaaaatgttaaatata

SEQ ID NO: 634 - DNA, 51 bp, Homo sapiens
  allele (26)...(0): single nucleotide polymorphism
  misc_feature (0)...(0): Accession number cg43980889
atgatgcttaccctggtaccgataggacagaaaatgttaaatatagacaag

SEQ ID NO: 635 - DNA, 51 bp, Homo sapiens
  allele (26)...(0): single nucleotide polymorphism
  misc_feature (0)...(0): Accession number cg43980889
gtaccgatagaacagaaaatgttaagtatagacaagtggaccattttgcct

SEQ ID NO: 636 - DNA, 51 bp, Homo sapiens
  allele (26)...(0): single nucleotide polymorphism
  misc_feature (0)...(0): Accession number cg43955651
cttccaccacgcctgtgttctgggcactgacaaaggccaccttgttggtgt

SEQ ID NO: 637 - DNA, 51 bp, Homo sapiens
  allele (26)...(0): single nucleotide polymorphism
  misc_feature (0)...(0): Accession number cg43955651
tgacaaaggccaccttgttggtgtcaggcttgaggcgaatgaagccacact

SEQ ID NO: 638 - DNA, 51 bp, Homo sapiens
  allele (26)...(0): single nucleotide polymorphism
  misc_feature (0)...(0): Accession number cg42353267
ggccttcgatccagtccatgagcaacgccatatagcgcggcgcagagagct

SEQ ID NO: 639 - DNA, 51 bp, Homo sapiens
  allele (26)...(0): single nucleotide polymorphism
  misc_feature (0)...(0): Accession number cg37027086
gggttcttcaactgggacaggaggcctctacccaccaggcccaaaacgagg

SEQ ID NO: 640 - DNA, 51 bp, Homo sapiens
  allele (26)...(0): single nucleotide polymorphism
  misc_feature (0)...(0): Accession number cg42688841
tcaacataaggtagaatttcattaatctcaagaagcgagcgtcatagtata

SEQ ID NO: 641 - DNA, 51 bp, Homo sapiens
  allele (26)...(0): single nucleotide polymorphism
  misc_feature (0)...(0): Accession number cg42688841
ataaggtagaatttcattaacctcaggaagcgagcgtcatagtataaagaa

SEQ ID NO: 642 - DNA, 51 bp, Homo sapiens
  allele (26)...(0): single nucleotide polymorphism
  misc_feature (0)...(0): Accession number cg42688841
agaatttcattaacctcaagaagcgggcgtcatagtataaagaaggcttga

SEQ ID NO: 643 - DNA, 51 bp, Homo sapiens
  allele (26)...(0): single nucleotide polymorphism
  misc_feature (0)...(0): Accession number cg42688841
tcaagaagcgagcgtcatagtataaggaaggcttgacgacaaacagtctct

SEQ ID NO: 644 - DNA, 51 bp, Homo sapiens
  allele (26)...(0): single nucleotide polymorphism
  misc_feature (0)...(0): Accession number cg43982291
cactgtgaccattttgtacagcaagcagcagcggtatattcccatccaaat

SEQ ID NO: 645 - DNA, 51 bp, Homo sapiens
  allele (26)...(0): single nucleotide polymorphism
  misc_feature (0)...(0): Accession number cg43982291
gtaaagctgttttcccagagctgtcaacactttcggctgggcatttagact

SEQ ID NO: 646 - DNA, 51 bp, Homo sapiens
  allele (26)...(0): single nucleotide polymorphism
  misc_feature (0)...(0): Accession number cg44003673
catgcttggtgcctggtgccaggtgggtgatgacgacctccacggcctgca

SEQ ID NO: 647 - DNA, 51 bp, Homo sapiens
  allele (26)...(0): single nucleotide polymorphism
  misc_feature (0)...(0): Accession number cg44003673
catcagagatgtgcaggaagatgtcagggccgccatcagctggggtaatga

SEQ ID NO: 648 - DNA, 51 bp, Homo sapiens
  allele (26)...(0): single nucleotide polymorphism
  misc_feature (0)...(0): Accession number cg44003673
tgtcggggccgccatcagctggggtgatgaagccatggcccttggaccggc

SEQ ID NO: 649 - DNA, 51 bp, Homo sapiens
  allele (26)...(0): single nucleotide polymorphism
  misc_feature (0)...(0): Accession number cg44936941
cgcgcacctcgtcgccgatctgctgcccggtctccttgccgaggaagtcgt

SEQ ID NO: 650 - DNA, 51 bp, Homo sapiens
  allele (26)...(0): single nucleotide polymorphism
  misc_feature (0)...(0): Accession number cg39523553
ggtctgcccgatccgggatggctgcaggtgggtgatcgacggtaggccgga

SEQ ID NO: 651 - DNA, 51 bp, Homo sapiens
  allele (26)...(0): single nucleotide polymorphism
  misc_feature (0)...(0): Accession number cg39523553
atggctgccggtgggtgatcgacggcaggccggacaatgccccggcccgtc

SEQ ID NO: 652 - DNA, 51 bp, Homo sapiens
  allele (26)...(0): single nucleotide polymorphism
  misc_feature (0)...(0): Accession number cg39523553
gaggacagccatggaagggcacggaccgccagtgccgcggcgtgattatgg

SEQ ID NO: 653 - DNA, 51 bp, Homo sapiens
  allele (26)...(0): single nucleotide polymorphism
  misc_feature (0)...(0): Accession number cg39523553
acgtggtgcgcaacagccctcacggggtgaaggtccagatggctctttccg

SEQ ID NO: 654 - DNA, 51 bp, Homo sapiens
  allele (26)...(0): single nucleotide polymorphism
  misc_feature (0)...(0): Accession number cg39523553
cctggcccgagctcgatcaggcatcgaggtgcctggaatccttactcgatg

SEQ ID NO: 655 - DNA, 51 bp, Homo sapiens
  allele (26)...(0): single nucleotide polymorphism
  misc_feature (0)...(0): Accession number cg39523553
tcgatcaggcatcaaggtgcctggagtccttactcgatgacggtttagtgc

SEQ ID NO: 656 - DNA, 51 bp, Homo sapiens
  allele (26)...(0): single nucleotide polymorphism
  misc_feature (0)...(0): Accession number cg36728314
gctgctgcttcttccttgtggcaacaatcttctgggcaacgtcctggaaga

SEQ ID NO: 657 - DNA, 51 bp, Homo sapiens
  allele (26)...(0): single nucleotide polymorphism
  misc_feature (0)...(0): Accession number cg41677120
ttcagtgcacaaatgagatgaatgttaacatcccacagttggcagacagtt

SEQ ID NO: 658 - DNA, 51 bp, Homo sapiens
  allele (26)...(0): single nucleotide polymorphism
  misc_feature (0)...(0): Accession number cg44126579
aggagtattcatcatccccaatgccatagccttcatgattgaggaatttgc

SEQ ID NO: 659 - DNA, 51 bp, Homo sapiens
  allele (26)...(0): single nucleotide polymorphism
  misc_feature (0)...(0): Accession number cg44126579
gagtggcccagccaatctgcatgacaccagaagtgaccactgttacttcat

SEQ ID NO: 660 - DNA, 51 bp, Homo sapiens
  allele (26)...(0): single nucleotide polymorphism
  misc_feature (0)...(0): Accession number cg38925480
agaatctcaccagccttgtggtgctacatttgcataacaaccgcatccagc

SEQ ID NO: 661 - DNA, 51 bp, Homo sapiens
  allele (26)...(0): single nucleotide polymorphism
  misc_feature (0)...(0): Accession number cg43323149
gcaccagcggaagccctacagacgggctcagcgtcatgcaagggccctaca

SEQ ID NO: 662 - DNA, 51 bp, Homo sapiens
  allele (26)...(0): single nucleotide polymorphism
  misc_feature (0)...(0): Accession number cg43323149
ctacagacggactcagcgtcatgcaggggccctacagcgaaacagccagct

SEQ ID NO: 663 - DNA, 51 bp, Homo sapiens
  allele (26)...(0): single nucleotide polymorphism
  misc_feature (0)...(0): Accession number cg43323149
gaaaatacagccggttagaagttcaggccgatgtccaaaaggaaattttcc

SEQ ID NO: 664 - DNA, 51 bp, Homo sapiens
  allele (26)...(0): single nucleotide polymorphism
  misc_feature (0)...(0): Accession number cg34243633
ccaccacagagataatgcaggccagcgaggagattgcactggatgtcacca

SEQ ID NO: 665 - DNA, 51 bp, Homo sapiens
  allele (26)...(0): single nucleotide polymorphism
  misc_feature (0)...(0): Accession number cg34243633
caactgctgtcacaatgctggcaccaacataagaacttgttttccagctgg

SEQ ID NO: 666 - DNA, 51 bp, Homo sapiens
  allele (26)...(0): single nucleotide polymorphism
  misc_feature (0)...(0): Accession number cg34243633
ggagcagcatggcaaccagtgtgcctaaaagccccagaaggcctaggatgt

SEQ ID NO: 667 - DNA, 51 bp, Homo sapiens
  allele (26)...(0): single nucleotide polymorphism
  misc_feature (0)...(0): Accession number cg43942922
agcccacatctcaggccactaggggaagaacaaataggtcctctgtcaaga

SEQ ID NO: 668 - DNA, 51 bp, Homo sapiens
  allele (26)...(0): single nucleotide polymorphism
  misc_feature (0)...(0): Accession number cg43942922
cagttgtccccacagcccctgagcttcagccttccacctccacagaccagc

SEQ ID NO: 669 - DNA, 51 bp, Homo sapiens
  allele (26)...(0): single nucleotide polymorphism
  misc_feature (0)...(0): Accession number cg43942922
ctgtcaagacccctgaaacagttgtccccacagcccctgagctccagcctt

SEQ ID NO: 670 - DNA, 51 bp, Homo sapiens
  allele (26)...(0): single nucleotide polymorphism
  misc_feature (0)...(0): Accession number cg43955219
cctggccaacatggcaaaaccccgtttctactaaaaatacaaaaagccggg

SEQ ID NO: 671 - DNA, 51 bp, Homo sapiens
  allele (26)...(0): single nucleotide polymorphism
  misc_feature (0)...(0): Accession number cg29142822
cactcacaaaaagggcaagaagcgcgaggagggataatgtcttggaagcca

SEQ ID NO: 672 - DNA, 51 bp, Homo sapiens
  allele (26)...(0): single nucleotide polymorphism
  misc_feature (0)...(0): Accession number cg43988710
ttggtgaagaggttgtacagcactcttagtgtagacttcaggtcacagttg

SEQ ID NO: 673 - DNA, 51 bp, Homo sapiens
  allele (26)...(0): single nucleotide polymorphism
  misc_feature (0)...(0): Accession number cg43988710
agaggttgtacagcactcgtagtgtggacttcaggtcacagttgacaatgt

SEQ ID NO: 674 - DNA, 51 bp, Homo sapiens
  allele (26)...(0): single nucleotide polymorphism
  misc_feature (0)...(0): Accession number cg39516123
gcttggaccggcatgtggcctatggcggctattctaccccggaggatcgga

SEQ ID NO: 675 - DNA, 51 bp, Homo sapiens
  allele (26)...(0): single nucleotide polymorphism
  misc_feature (0)...(0): Accession number cg39516123
caggcagcctgggacagcccagcccatctgcccagagaaactaccagagct

SEQ ID NO: 676 - DNA, 51 bp, Homo sapiens
  allele (26)...(0): single nucleotide polymorphism
  misc_feature (0)...(0): Accession number cg39516123
tcagctcctctccggaaagccaggctcgagctcagttcagtgtggctggcg

SEQ ID NO: 677 - DNA, 51 bp, Homo sapiens
  allele (26)...(0): single nucleotide polymorphism
  misc_feature (0)...(0): Accession number cg39516123
cggtgcctgggagccctcaggcgcgtcacagaacagtgggcaccaacactc

SEQ ID NO: 678 - DNA, 51 bp, Homo sapiens
  allele (26)...(0): single nucleotide polymorphism
  misc_feature (0)...(0): Accession number cg42731307
ggaaatgagccaaagttcgcatgaacccacggaagtttacctggtcctctc

SEQ ID NO: 679 - DNA, 51 bp, Homo sapiens
  allele (26)...(0): single nucleotide polymorphism
  misc_feature (0)...(0): Accession number cg44128084
ccggacaacaccgttggagttctttcgccgtcaacgagttgtctctggaaa

SEQ ID NO: 680 - DNA, 51 bp, Homo sapiens
  allele (26)...(0): single nucleotide polymorphism
  misc_feature (0)...(0): Accession number cg44128084
tgagcgctcacgctctctttgctcggccgctggtcatgagcccagctgctc

SEQ ID NO: 681 - DNA, 51 bp, Homo sapiens
  allele (26)...(0): single nucleotide polymorphism
  misc_feature (0)...(0): Accession number cg44128084
tctttgctcgaccgctggtcatgagtccagctgctcgagtggaccttgaca

SEQ ID NO: 682 - DNA, 51 bp, Homo sapiens
  allele (26)...(0): single nucleotide polymorphism
  misc_feature (0)...(0): Accession number cg44128084
tggtcatgagcccagctgctcgagtagaccttgacatccagccagacggtt

SEQ ID NO: 683 - DNA, 51 bp, Homo sapiens
  allele (26)...(0): single nucleotide polymorphism
  misc_feature (0)...(0): Accession number cg44128084
acatccagccagacggttcagaatcggcggttctgtggtgcgacgggcgcc

SEQ ID NO: 684 - DNA, 51 bp, Homo sapiens
  allele (26)...(0): single nucleotide polymorphism
  misc_feature (0)...(0): Accession number cg30455661
ccacatacacaacagcatatacctttcctgggattctcaagtggtttgaag

SEQ ID NO: 685 - DNA, 51 bp, Homo sapiens
  allele (26)...(0): single nucleotide polymorphism
  misc_feature (0)...(0): Accession number cg30455661
gatttcaacagaagaaatcagccctttggagaatgccatagaaaccatgga

SEQ ID NO: 686 - DNA, 51 bp, Homo sapiens
  allele (26)...(0): single nucleotide polymorphism
  misc_feature (0)...(0): Accession number cg30455661
ccatagaaaccatggagctgaccaatgagaggatcagcaactgtgttcagc

SEQ ID NO: 687 - DNA, 51 bp, Homo sapiens
  allele (26)...(0): single nucleotide polymorphism
  misc_feature (0)...(0): Accession number cg43302460
agctcgggagtacaggtgaaacttcgcgaattgcctgttccttctttctga

SEQ ID NO: 688 - DNA, 51 bp, Homo sapiens
  allele (26)...(0): single nucleotide polymorphism
  misc_feature (0)...(0): Accession number cg43153425
aaggccgactttctgtaggaagtaatcgtgaccgagagatcagcatgtctg

SEQ ID NO: 689 - DNA, 51 bp, Homo sapiens
  allele (26)...(0): single nucleotide polymorphism
  misc_feature (0)...(0): Accession number cg43153425
gactttctgtaggaagtaaccgtgatcgagagatcagcatgtctgtcggtc

SEQ ID NO: 690 - DNA, 51 bp, Homo sapiens
  allele (26)...(0): single nucleotide polymorphism
  misc_feature (0)...(0): Accession number cg43153425
gtgaccgagagatcagcatgtctgttggtctgggaaggtcacagttagact

SEQ ID NO: 691 - DNA, 51 bp, Homo sapiens
  allele (26)...(0): single nucleotide polymorphism
  misc_feature (0)...(0): Accession number cg43153425
tcagcatgtctgtcggtctgggaagatcacagttagactccaaaggaggag

SEQ ID NO: 692 - DNA, 51 bp, Homo sapiens
  allele (26)...(0): single nucleotide polymorphism
  misc_feature (0)...(0): Accession number cg43153425
tgtctgtcggtctgggaaggtcacaattagactccaaaggaggagtagttg

SEQ ID NO: 693 - DNA, 51 bp, Homo sapiens
  allele (26)...(0): single nucleotide polymorphism
  misc_feature (0)...(0): Accession number cg43153425
tcggtctgggaaggtcacagttagattccaaaggaggagtagttggtggga

SEQ ID NO: 694 - DNA, 51 bp, Homo sapiens
  allele (26)...(0): single nucleotide polymorphism
  misc_feature (0)...(0): Accession number cg43153425
gtctgggaaggtcacagttagactctaaaggaggagtagttggtgggacca

SEQ ID NO: 695 - DNA, 51 bp, Homo sapiens
  allele (26)...(0): single nucleotide polymorphism
  misc_feature (0)...(0): Accession number cg43153425
caaatcagcaaccaaaccacaaaattcaaattactatgggttctactgaat

SEQ ID NO: 696 - DNA, 51 bp, Homo sapiens
  allele (26)...(0): single nucleotide polymorphism
  misc_feature (0)...(0): Accession number cg43153425
tgggttctactgaatctcgggttgattacatgggctcaagcatcctcatgg

SEQ ID NO: 697 - DNA, 51 bp, Homo sapiens
  allele (26)...(0): single nucleotide polymorphism
  misc_feature (0)...(0): Accession number cg30384142
cttgcgcggcaccaggcggtaagacaacccatattttagaactggcacctc

SEQ ID NO: 698 - DNA, 51 bp, Homo sapiens
  allele (26)...(0): single nucleotide polymorphism
  misc_feature (0)...(0): Accession number cg44015614
gctctggctggggtgcagtatacttttccacgtattctatttccacaactt

SEQ ID NO: 699 - DNA, 51 bp, Homo sapiens
  allele (26)...(0): single nucleotide polymorphism
  misc_feature (0)...(0): Accession number cg44015614
gctggggtgcagtatacttctccacatattctatttccacaacttcttctg

SEQ ID NO: 700 - DNA, 51 bp, Homo sapiens
  allele (26)...(0): single nucleotide polymorphism
  misc_feature (0)...(0): Accession number cg44015614
tctccacgtattctatttccacaacctcttctgatgagatgttctccattt

SEQ ID NO: 701 - DNA, 51 bp, Homo sapiens
  allele (26)...(0): single nucleotide polymorphism
  misc_feature (0)...(0): Accession number cg44015614
cgtattctatttccacaacttcttccgatgagatgttctccatttccatgt

SEQ ID NO: 702 - DNA, 51 bp, Homo sapiens
  allele (26)...(0): single nucleotide polymorphism
  misc_feature (0)...(0): Accession number cg44015614
ctatttccacaacttcttctgatgaaatgttctccatttccatgtgtttgt

SEQ ID NO: 703 - DNA, 51 bp, Homo sapiens
  allele (26)...(0): single nucleotide polymorphism
  misc_feature (0)...(0): Accession number cg44015614
agggcattcgcagaaactggcccttgataaggaaatcaaactccacatgtt

SEQ ID NO: 704 - DNA, 51 bp, Homo sapiens
  allele (26)...(0): single nucleotide polymorphism
  misc_feature (0)...(0): Accession number cg42380652
agtccaggcaggggcccacgtcctcccggtacaccctttccaggaaggggc

SEQ ID NO: 705 - DNA, 51 bp, Homo sapiens
  allele (26)...(0): single nucleotide polymorphism
  misc_feature (0)...(0): Accession number cg43931038
tcttctctagagtcccgcggctcacggcctttgctgcgaagggcaacttgt

SEQ ID NO: 706 - DNA, 51 bp, Homo sapiens
  allele (26)...(0): single nucleotide polymorphism
  misc_feature (0)...(0): Accession number cg43931038
gtcccgcggctcacagcctttgctgggaagggcaacttgtgggcaacctgg

SEQ ID NO: 707 - DNA, 51 bp, Homo sapiens
  allele (26)...(0): single nucleotide polymorphism
  misc_feature (0)...(0): Accession number cg43931038
aagggcaacttgtgggcaacctggttaaggaaaccttgacttcttcaaatt

SEQ ID NO: 708 - DNA, 51 bp, Homo sapiens
  allele (26)...(0): single nucleotide polymorphism
  misc_feature (0)...(0): Accession number cg43931038
aacttgtgggcaacctggtcaaggacaccttgacttcttcaaattcacaac

SEQ ID NO: 709 - DNA, 51 bp, Homo sapiens
  allele (26)...(0): single nucleotide polymorphism
  misc_feature (0)...(0): Accession number cg43931038
gcaacctggtcaaggaaaccttgacctcttcaaattcacaacgcccaccca

SEQ ID NO: 710 - DNA, 51 bp, Homo sapiens
  allele (26)...(0): single nucleotide polymorphism
  misc_feature (0)...(0): Accession number cg43931038
ccttgacttcttcaaattcacaacgtccacccatctctacaacaaggcggc

SEQ ID NO: 711 - DNA, 51 bp, Homo sapiens
  allele (26)...(0): single nucleotide polymorphism
  misc_feature (0)...(0): Accession number cg43931038
tcacgtagtggtcaatagcacctttacctccccccatgcgatgcccaacac

SEQ ID NO: 712 - DNA, 51 bp, Homo sapiens
  allele (26)...(0): single nucleotide polymorphism
  misc_feature (0)...(0): Accession number cg43338979
catcatctcctgaagatgctagcactgttcctgttatattccaactcactc

SEQ ID NO: 713 - DNA, 51 bp, Homo sapiens
  allele (26)...(0): single nucleotide polymorphism
  misc_feature (0)...(0): Accession number cg38450437
gaattggttctgaggagtttgaggaacttcttttactgatggacagaaatc

SEQ ID NO: 714 - DNA, 51 bp, Homo sapiens
  allele (26)...(0): single nucleotide polymorphism
  misc_feature (0)...(0): Accession number cg38450437
ccagggaaagtgcacagccagagaactggtcttgcaactgcatccagtgtg

SEQ ID NO: 715 - DNA, 51 bp, Homo sapiens
  allele (26)...(0): single nucleotide polymorphism
  misc_feature (0)...(0): Accession number cg43314946
ccttccggatgactttctccgcatcttgccccagcagctggacagcataca

SEQ ID NO: 716 - DNA, 51 bp, Homo sapiens
  allele (26)...(0): single nucleotide polymorphism
  misc_feature (0)...(0): Accession number cg44010070
tcaagcactcggacgggacgcgcacctgcgccaagctctatgacaagagcg

SEQ ID NO: 717 - DNA, 51 bp, Homo sapiens
  allele (26)...(0): single nucleotide polymorphism
  misc_feature (0)...(0): Accession number cg39380052
acctcatcaccccgtaccatcagactctcgacaaggtcactgagcgttttc

SEQ ID NO: 718 - DNA, 51 bp, Homo sapiens
  allele (26)...(0): single nucleotide polymorphism
  misc_feature (0)...(0): Accession number cg39380052
gtcgtggcatcgggccgacctactccgacaagatcaatcggatgggtattc

SEQ ID NO: 719 - DNA, 51 bp, Homo sapiens
  allele (26)...(0): single nucleotide polymorphism
  misc_feature (0)...(0): Accession number cg39380052
actctgacaagatcaatcggatgggcattcgcgtccaggatcttttcgacg

SEQ ID NO: 720 - DNA, 51 bp, Homo sapiens
  allele (26)...(0): single nucleotide polymorphism
  misc_feature (0)...(0): Accession number cg43329819
tcatcgacaaccagaacctcctcttcgagctctcctacaagctggaggcaa

SEQ ID NO: 721 - DNA, 51 bp, Homo sapiens
  allele (26)...(0): single nucleotide polymorphism
  misc_feature (0)...(0): Accession number cg43298242
ctgaagatctgttggcagggctcacggagacgggggtgaggggagagatcg

SEQ ID NO: 722 - DNA, 51 bp, Homo sapiens
  allele (26)...(0): single nucleotide polymorphism
  misc_feature (0)...(0): Accession number cg43298242
tggcagggctcacagagacgggggtaaggggagagatcgtgggttcatgag

SEQ ID NO: 723 - DNA, 51 bp, Homo sapiens
  allele (26)...(0): single nucleotide polymorphism
  misc_feature (0)...(0): Accession number cg43970780
ggagttctggttctggtagatggaaactttctctttcaacaggtccagaca

SEQ ID NO: 724 - DNA, 51 bp, Homo sapiens
  allele (26)...(0): single nucleotide polymorphism
  misc_feature (0)...(0): Accession number cg43957906
ggagtccttggcggcgtcatatgggcgctccttggaggggatctccaggac

SEQ ID NO: 725 - DNA, 51 bp, Homo sapiens
  allele (26)...(0): single nucleotide polymorphism
  misc_feature (0)...(0): Accession number cg43952088
tgaggggagcgtcgccggccgcggaacagatgccgcgggggccgctcgcag

SEQ ID NO: 726 - DNA, 51 bp, Homo sapiens
  allele (26)...(0): single nucleotide polymorphism
  misc_feature (0)...(0): Accession number cg43956666
actcctgttctggggacagtttggtgttaaaacacttaaatatagatccgg

SEQ ID NO: 727 - DNA, 51 bp, Homo sapiens
  allele (26)...(0): single nucleotide polymorphism
  misc_feature (0)...(0): Accession number cg43942011
ttccccatgtgaaacatctggcttgtgacaggtgattttttcacaggtagg

SEQ ID NO: 728 - DNA, 51 bp, Homo sapiens
  allele (26)...(0): single nucleotide polymorphism
  misc_feature (0)...(0): Accession number cg43973728
tatgaaccacccagatctgaagaagctgctgttctgaaacagaagttggag

SEQ ID NO: 729 - DNA, 51 bp, Homo sapiens
  allele (26)...(0): single nucleotide polymorphism
  misc_feature (0)...(0): Accession number cg44017721
tcctgctcctccgtggcctcctttgacagcgctggccaagccccgggtcag

SEQ ID NO: 730 - DNA, 51 bp, Homo sapiens
  allele (26)...(0): single nucleotide polymorphism
  misc_feature (0)...(0): Accession number cg43273880
caaaagaagaaagacgacgtgactgcgggtaagaaaccatttcgtccagag

SEQ ID NO: 731 - DNA, 51 bp, Homo sapiens
  allele (26)...(0): single nucleotide polymorphism
  misc_feature (0)...(0): Accession number cg43992911
gaagaagaacttttttaaactgaacgataaaagtgaaaaagataagaagga

SEQ ID NO: 732 - DNA, 51 bp, Homo sapiens
  allele (26)...(0): single nucleotide polymorphism
  misc_feature (0)...(0): Accession number cg41029366
tgcggccacaaagaggacgcgggcgcggtgtgctcagagcaccagtcctgg

SEQ ID NO: 733 - DNA, 51 bp, Homo sapiens
  allele (26)...(0): single nucleotide polymorphism
  misc_feature (0)...(0): Accession number cg43931167
cgagaactgaagaaagcaagaacaggcctacaaatggatgaactcaaatgt

SEQ ID NO: 734 - DNA, 51 bp, Homo sapiens
  allele (26)...(0): single nucleotide polymorphism
  misc_feature (0)...(0): Accession number cg43925670
aatctgaattttgtcatactcttctttcatttttaaattaagttttaaatc

SEQ ID NO: 735 - DNA, 51 bp, Homo sapiens
  allele (26)...(0): single nucleotide polymorphism
  misc_feature (0)...(0): Accession number cg43925670
tagaacaatgttcttgtatttttttgccatctttacagacataagtgagcc

SEQ ID NO: 736 - DNA, 51 bp, Homo sapiens
  allele (26)...(0): single nucleotide polymorphism
  misc_feature (0)...(0): Accession number cg43928549
aattggcacatcttggcgcgaaagttgttcacttctgggtcgcacaaggag

SEQ ID NO: 737 - DNA, 51 bp, Homo sapiens
  allele (26)...(0): single nucleotide polymorphism
  misc_feature (0)...(0): Accession number cg42703622
gaagaaggaatttggaggtggccacgttaaagatgaagtatttggaacagt

SEQ ID NO: 738 - DNA, 51 bp, Homo sapiens
  allele (26)...(0): single nucleotide polymorphism
  misc_feature (0)...(0): Accession number cg44131752
ctctgcgtgctcgtcccgaagtgacgtgcctggttccgacaaggacactga

SEQ ID NO: 739 - DNA, 51 bp, Homo sapiens
  allele (26)...(0): single nucleotide polymorphism
  misc_feature (0)...(0): Accession number cg25143358
caggtggccattcgggcggcttcaattttcgtggtcatgccgccggttccc

SEQ ID NO: 740 - DNA, 51 bp, Homo sapiens
  allele (26)...(0): single nucleotide polymorphism
  misc_feature (0)...(0): Accession number cg43105476
gcgaaaccagttcggtctttcaaattgggattagcacctctaagtagcagt

SEQ ID NO: 741 - DNA, 51 bp, Homo sapiens
  allele (26)...(0): single nucleotide polymorphism
  misc_feature (0)...(0): Accession number cg38642684
atattgcctagtaatttctgataattatttaaggtatgtaagttgctagta

SEQ ID NO: 742 - DNA, 51 bp, Homo sapiens
  allele (26)...(0): single nucleotide polymorphism
  misc_feature (0)...(0): Accession number cg39518465
cacttcctaaaggagatgaaggaagtcctgggcacccctggcgcagccaat

SEQ ID NO: 743 - DNA, 51 bp, Homo sapiens
  allele (26)...(0): single nucleotide polymorphism
  misc_feature (0)...(0): Accession number cg43021380
cagccgcccggggggctgcagcgccattagtgcccacggctgtctatttga

SEQ ID NO: 744 - DNA, 51 bp, Homo sapiens
  allele (26)...(0): single nucleotide polymorphism
  misc_feature (0)...(0): Accession number cg39728924
caattgtggagaagagtatttttatatcgctactcaaggaccactgctgag

SEQ ID NO: 745 - DNA, 51 bp, Homo sapiens
  allele (26)...(0): single nucleotide polymorphism
  misc_feature (0)...(0): Accession number cg42710490
caaccagcctattgggggaagaaatatccagggtggaatccgttttgggga

SEQ ID NO: 746 - DNA, 51 bp, Homo sapiens
  allele (26)...(0): single nucleotide polymorphism
  misc_feature (0)...(0): Accession number cg44001078
ggttatcaggaacttgggatcttcatggatttccatcttgttcttcatcca

SEQ ID NO: 747 - DNA, 51 bp, Homo sapiens
  allele (26)...(0): single nucleotide polymorphism
  misc_feature (0)...(0): Accession number cg43916919
aggtaggagtcccccgagaagaagatgccctggttctcttgcgccacaggc

SEQ ID NO: 748 - DNA, 51 bp, Homo sapiens
  allele (26)...(0): single nucleotide polymorphism
  misc_feature (0)...(0): Accession number cg42930605
cagctccttgctggtcttctgcaccttcacctccatgtcgtacttctcctc

SEQ ID NO: 749 - DNA, 51 bp, Homo sapiens
  allele (26)...(0): single nucleotide polymorphism
  misc_feature (0)...(0): Accession number cg36824552
aagacgagccgaggcttcacctaccgcctgcacttctggctcggaaaggag

SEQ ID NO: 750 - DNA, 51 bp, Homo sapiens
  allele (26)...(0): single nucleotide polymorphism
  misc_feature (0)...(0): Accession number cg42522566
caacatcatgaaccagctcagccacataaacttgatccaactttatgatgc

SEQ ID NO: 751 - DNA, 51 bp, Homo sapiens
  allele (26)...(0): single nucleotide polymorphism
  misc_feature (0)...(0): Accession number cg42522566
gtaccacctcactgagttggatgtgatcttgttcacgaggcagatctgtga

SEQ ID NO: 752 - DNA, 51 bp, Homo sapiens
  allele (26)...(0): single nucleotide polymorphism
  misc_feature (0)...(0): Accession number cg42489842
tgcaagtgaatatgccaaatactgcacagaaatattaggagttgcagctac

SEQ ID NO: 753 - DNA, 51 bp, Homo sapiens
  allele (26)...(0): single nucleotide polymorphism
  misc_feature (0)...(0): Accession number cg43919398
gttagtctctgtggtgtgcttataaccatttggggtccaacattcacattt

SEQ ID NO: 754 - DNA, 51 bp, Homo sapiens
  allele (26)...(0): single nucleotide polymorphism
  misc_feature (0)...(0): Accession number cg20612302
atggaggcggcccacatggcggccagcgccatcctcaacctgtccacgcgc

SEQ ID NO: 755 - DNA, 51 bp, Homo sapiens
  allele (26)...(0): single nucleotide polymorphism
  misc_feature (0)...(0): Accession number cg44928196
ggctctgttccatgggaaattcataaacacgggtttttctttaccattcta

SEQ ID NO: 756 - DNA, 51 bp, Homo sapiens
  allele (26)...(0): single nucleotide polymorphism
  misc_feature (0)...(0): Accession number cg43301812
ggctggtccttctccatggctgggacgctctgctgcgcttggttttgcccg

SEQ ID NO: 757 - DNA, 51 bp, Homo sapiens
  allele (26)...(0): single nucleotide polymorphism
  misc_feature (0)...(0): Accession number cg43917191
gcttctcttttcacattgtatgtattcaggtgttcttgcaactccaaaaca

SEQ ID NO: 758 - DNA, 51 bp, Homo sapiens
  allele (26)...(0): single nucleotide polymorphism
  misc_feature (0)...(0): Accession number cg43918356
gctcatgtcatcttcatctagaaacaccctcacggaaatggaattgctgcc

SEQ ID NO: 759 - DNA, 51 bp, Homo sapiens
  allele (26)...(0): single nucleotide polymorphism
  misc_feature (0)...(0): Accession number cg43932090
tcttttcaagctttctttatgttgtctattgtcttcattttcttgaaggtc

SEQ ID NO: 760 - DNA, 51 bp, Homo sapiens
  allele (26)...(0): single nucleotide polymorphism
  misc_feature (0)...(0): Accession number cg43950437
agccagaggctggtacctagaaccactggatggtttcttggctgatggcgc

SEQ ID NO: 761 - DNA, 51 bp, Homo sapiens
  allele (26)...(0): single nucleotide polymorphism
  misc_feature (0)...(0): Accession number cg42935995
gcctcgctccccgtctgagagcctcgcgccctccagccagccgtcactgct

SEQ ID NO: 762 - DNA, 51 bp, Homo sapiens
  allele (26)...(0): single nucleotide polymorphism
  misc_feature (0)...(0): Accession number cg43971614
tccatttgaatccaatcccccatgggcataagaagagttctttccataaaa

SEQ ID NO: 763 - DNA, 51 bp, Homo sapiens
  allele (26)...(0): single nucleotide polymorphism
  misc_feature (0)...(0): Accession number cg43922856
cttgaaatttccagtcaccctattggcaactaaggattcgttgcttgaagc

SEQ ID NO: 764 - DNA, 51 bp, Homo sapiens
  allele (26)...(0): single nucleotide polymorphism
  misc_feature (0)...(0): Accession number cg43922856
ccacttgtccattcagtctcagttactccagcttgagaatagctctgattg

SEQ ID NO: 765 - DNA, 51 bp, Homo sapiens
  allele (26)...(0): single nucleotide polymorphism
  misc_feature (0)...(0): Accession number cg43955639
ggccgcggggggatagctgcccagggtcaggaggctcttgggctcctgcca

SEQ ID NO: 766 - DNA, 51 bp, Homo sapiens
  allele (26)...(0): single nucleotide polymorphism
  misc_feature (0)...(0): Accession number cg41022625
cacggcgttctggatcgtcttctccgtcattcacatcatcgccaccctgct

SEQ ID NO: 767 - DNA, 51 bp, Homo sapiens
  allele (26)...(0): single nucleotide polymorphism
  misc_feature (0)...(0): Accession number cg43119894
tgagcatagctctgagctctctttatacggtcagggtccacataatgcatt

SEQ ID NO: 768 - DNA, 51 bp, Homo sapiens
  allele (26)...(0): single nucleotide polymorphism
  misc_feature (0)...(0): Accession number cg43303845
agaacgagagaggctggagagactggaacgggagaggcaagaaagggagcg

SEQ ID NO: 769 - DNA, 51 bp, Homo sapiens
  allele (26)...(0): single nucleotide polymorphism
  misc_feature (0)...(0): Accession number cg44927166
gtctttgtcttcccaatccctttggtgttctcgttctttatccctttctct

SEQ ID NO: 770 - DNA, 51 bp, Homo sapiens
  allele (26)...(0): single nucleotide polymorphism
  misc_feature (0)...(0): Accession number cg38059286
agctgtatagctccagtggtcctgatctccgccgctccctcttctcactga

SEQ ID NO: 771 - DNA, 51 bp, Homo sapiens
  allele (26)...(0): single nucleotide polymorphism
  misc_feature (0)...(0): Accession number cg29351416
ctgcccagccagccccatcccctgatgacctggctttgtcaatgggcacca

SEQ ID NO: 772 - DNA, 51 bp, Homo sapiens
  allele (26)...(0): single nucleotide polymorphism
  misc_feature (0)...(0): Accession number cg43960639
ccatgtctgggagaatgggagcctcctcgcccacttgaaagtcaaagtaga

SEQ ID NO: 773 - DNA, 51 bp, Homo sapiens
  allele (26)...(0): single nucleotide polymorphism
  misc_feature (0)...(0): Accession number cg43325007
gtggatatatgtggcctgcagtatgacccacagcttctcctggaggctgcc

SEQ ID NO: 774 - DNA, 51 bp, Homo sapiens
  allele (26)...(0): single nucleotide polymorphism
  misc_feature (0)...(0): Accession number cg42907145
gccacctcccataaccttctcagcaacatagactgacttgccacatcgagg

SEQ ID NO: 775 - DNA, 51 bp, Homo sapiens
  allele (26)...(0): single nucleotide polymorphism
  misc_feature (0)...(0): Accession number cg43972159
aagccattaggttctcgggctgctgtactgttcgattttgacttttctttc

SEQ ID NO: 776 - DNA, 51 bp, Homo sapiens
  allele (26)...(0): single nucleotide polymorphism
  misc_feature (0)...(0): Accession number cg39512856
ccaggctgtgccgttccacttctgaaattcccctcccggcgataaccaggt

SEQ ID NO: 777 - DNA, 51 bp, Homo sapiens
  allele (26)...(0): single nucleotide polymorphism
  misc_feature (0)...(0): Accession number cg28461713
tctgcaaatttgctcctgggcatggacagcttgcagctgaagttggttgta

SEQ ID NO: 778 - DNA, 51 bp, Homo sapiens
  allele (26)...(0): single nucleotide polymorphism
  misc_feature (0)...(0): Accession number cg43969092
cggcgcccgtcatcacggatgtgcaagtccccgtcggtcagcagcagcaca

SEQ ID NO: 779 - DNA, 51 bp, Homo sapiens
  allele (26)...(0): single nucleotide polymorphism
  misc_feature (0)...(0): Accession number cg42688841
gcgtcatagtataaagaaggcttgatgacaaacagtctcttgccatggtcc

SEQ ID NO: 780 - DNA, 51 bp, Homo sapiens
  allele (26)...(0): single nucleotide polymorphism
  misc_feature (0)...(0): Accession number cg39523553
gacgcgttggttcccgacgaagacgtccgagcggccaagtgggcggtggcg

SEQ ID NO: 781 - DNA, 51 bp, Homo sapiens
  allele (26)...(0): single nucleotide polymorphism
  misc_feature (0)...(0): Accession number cg39523553
atggacgtggtgcgcaacagccctcgcggagtgaaggtccagatggctctt

SEQ ID NO: 782 - DNA, 51 bp, Homo sapiens
  allele (26)...(0): single nucleotide polymorphism
  misc_feature (0)...(0): Accession number cg39523553
ccagatggctctttccgcctggccccagctcgatcaggcatcaaggtgcct

SEQ ID NO: 783 - DNA, 51 bp, Homo sapiens
  allele (26)...(0): single nucleotide polymorphism
  misc_feature (0)...(0): Accession number cg35933325
aaccacagagaatacagtgacaacatagaaacaaaatgaccaaatgccact

SEQ ID NO: 784 - DNA, 51 bp, Homo sapiens
  allele (26)...(0): single nucleotide polymorphism
  misc_feature (0)...(0): Accession number cg41677120
gttgtttaacttaagcaattttttgaataaaagtggattgcaaggatatga

SEQ ID NO: 785 - DNA, 51 bp, Homo sapiens
  allele (26)...(0): single nucleotide polymorphism
  misc_feature (0)...(0): Accession number cg43951096
aacatcaacaatcgttattgggtctctatttttgctagaagaagtatctgg

SEQ ID NO: 786 - DNA, 51 bp, Homo sapiens
  allele (26)...(0): single nucleotide polymorphism
  misc_feature (0)...(0): Accession number cg42696021
gctgtgccgccttcacaatgaagtggaccggaagctgggcaagcctgattt

SEQ ID NO: 787 - DNA, 51 bp, Homo sapiens
  allele (26)...(0): single nucleotide polymorphism
  misc_feature (0)...(0): Accession number cg34243633
gctggcaccgacataagaacttgttctccagctggggagcagcatggcaac

SEQ ID NO: 788 - DNA, 51 bp, Homo sapiens
  allele (26)...(0): single nucleotide polymorphism
  misc_feature (0)...(0): Accession number cg34243633
ttccagctggggagcagcatggcaatcagtgtgcccaaaagccccagaagg

SEQ ID NO: 789 - DNA, 51 bp, Homo sapiens
  allele (26)...(0): single nucleotide polymorphism
  misc_feature (0)...(0): Accession number cg43942922
gtcctctgtcaagacccctgaaacaattgtccccacagcccctgagctcca

SEQ ID NO: 790 - DNA, 51 bp, Homo sapiens
  allele (26)...(0): single nucleotide polymorphism
  misc_feature (0)...(0): Accession number cg43942922
tgagctccagccttccacctccacaaaccagcctgtcacctctgagcccac

SEQ ID NO: 791 - DNA, 51 bp, Homo sapiens
  allele (26)...(0): single nucleotide polymorphism
  misc_feature (0)...(0): Accession number cg44938009
ttctgtcaatgtggtccgtgccatggttgataactgggatgtcctcttcca

SEQ ID NO: 792 - DNA, 51 bp, Homo sapiens
  allele (26)...(0): single nucleotide polymorphism
  misc_feature (0)...(0): Accession number cg39516123
agccctcaggcgcgccacagaacagggggcaccaacactccccctagtcct

SEQ ID NO: 793 - DNA, 51 bp, Homo sapiens
  allele (26)...(0): single nucleotide polymorphism
  misc_feature (0)...(0): Accession number cg44921974
gattatgtcgccgttgagttcggtcgcagacttgatgtttttgaaagttgt

SEQ ID NO: 794 - DNA, 51 bp, Homo sapiens
  allele (26)...(0): single nucleotide polymorphism
  misc_feature (0)...(0): Accession number cg42731307
aaggcattgatgatccggtcccccactgggttgatggcaagttctggaatc

SEQ ID NO: 795 - DNA, 51 bp, Homo sapiens
  allele (26)...(0): single nucleotide polymorphism
  misc_feature (0)...(0): Accession number cg42731307
caagttctggaatcctctggaaatcgtcccggctgagagtcccattctctc

SEQ ID NO: 796 - DNA, 51 bp, Homo sapiens
  allele (26)...(0): single nucleotide polymorphism
  misc_feature (0)...(0): Accession number cg44015614
tccacaacttcttctgatgagatgtcctccatttccatgtgtttgtccaag

SEQ ID NO: 797 - DNA, 51 bp, Homo sapiens
  allele (26)...(0): single nucleotide polymorphism
  misc_feature (0)...(0): Accession number cg43298242
gatctgttggcagggctcacagagatgggggtgaggggagagatcgtgggt

SEQ ID NO: 798 - DNA, 51 bp, Homo sapiens
  allele (26)...(0): single nucleotide polymorphism
  misc_feature (0)...(0): Accession number cg43299610
ctcccagtgcccgcccgactaccactacatccacaccgagatctcccggga

SEQ ID NO: 799 - DNA, 51 bp, Homo sapiens
  allele (26)...(0): single nucleotide polymorphism
  misc_feature (0)...(0): Accession number cg42532480
tttcctgaatgaatgttaaagattcagtcaaggtcagtatggcgatccaag

SEQ ID NO: 800 - DNA, 51 bp, Homo sapiens
  allele (26)...(0): single nucleotide polymorphism
  misc_feature (0)...(0): Accession number cg42926989
gcaatgagctgctggcagcacaaagtcttatcgcaccaggaaagatgcagc

SEQ ID NO: 801 - DNA, 51 bp, Homo sapiens
  allele (26)...(0): single nucleotide polymorphism
  misc_feature (0)...(0): Accession number cg43991318
tggtccgggaatacctggtggacccggcgggcccggctgccaggagctgcc

SEQ ID NO: 802 - DNA, 51 bp, Homo sapiens
  allele (26)...(0): single nucleotide polymorphism
  misc_feature (0)...(0): Accession number cg43920512
aattcaaagtatcatggtgtttctcccctcaacccaccagagacactaaat

SEQ ID NO: 803 - DNA, 51 bp, Homo sapiens
  allele (26)...(0): single nucleotide polymorphism
  misc_feature (0)...(0): Accession number cg43063374
agagattgaacgtgtggttggcagacaccggagcccctgcatgcaggacag

SEQ ID NO: 804 - DNA, 51 bp, Homo sapiens
  allele (26)...(0): single nucleotide polymorphism
  misc_feature (0)...(0): Accession number cg21416244
gggtgaactgtctatccaccattattatctattcaggcacattcaggacct

SEQ ID NO: 805 - DNA, 51 bp, Homo sapiens
  allele (26)...(0): single nucleotide polymorphism
  misc_feature (0)...(0): Accession number cg44017721
agataggagttgaaggtgcagagggtcacgctgggcagcgccagcacgaag

SEQ ID NO: 806 - DNA, 51 bp, Homo sapiens
  allele (26)...(0): single nucleotide polymorphism
  misc_feature (0)...(0): Accession number cg43275625
tggtactcctttgccgccagcttgggctcatggtacacgttgggtttggta

SEQ ID NO: 807 - DNA, 51 bp, Homo sapiens
  allele (26)...(0): single nucleotide polymorphism
  misc_feature (0)...(0): Accession number cg43312829
tagtgaaaatctccaatcaaagacagcaggactccatgtaactgaatatga

SEQ ID NO: 808 - DNA, 51 bp, Homo sapiens
  allele (26)...(0): single nucleotide polymorphism
  misc_feature (0)...(0): Accession number cg43959136
tgggccaacaagcttgagtgcgatctggtctgcaatgatggaggaattgcc

SEQ ID NO: 809 - DNA, 51 bp, Homo sapiens
  allele (26)...(0): single nucleotide polymorphism
  misc_feature (0)...(0): Accession number cg43969759
tgtcaggaggaagatctcatctggggtgtgccggatcccgccggcgatgac

SEQ ID NO: 810 - DNA, 51 bp, Homo sapiens
  allele (26)...(0): single nucleotide polymorphism
  misc_feature (0)...(0): Accession number cg39523614
gggagctttagacattgccacggatcacgtccagaagcgcaagcagtttgg

SEQ ID NO: 811 - DNA, 51 bp, Homo sapiens
  allele (26)...(0): single nucleotide polymorphism
  misc_feature (0)...(0): Accession number cg42175288
tggagaccccaaaagtggggattggttttgccctaatccgtcatgcggaaa

SEQ ID NO: 812 - DNA, 51 bp, Homo sapiens
  allele (26)...(0): single nucleotide polymorphism
  misc_feature (0)...(0): Accession number cg43154217
gcagaagaggtgattgtgagaggacaaagagctccaggaacagctggaact

SEQ ID NO: 813 - DNA, 51 bp, Homo sapiens
  allele (26)...(0): single nucleotide polymorphism
  misc_feature (0)...(0): Accession number cg39709402
ggaaaacattaataaacaagtagaaccctacagagaggaatcgcaaaaatc

SEQ ID NO: 814 - DNA, 51 bp, Homo sapiens
  allele (26)...(0): single nucleotide polymorphism
  misc_feature (0)...(0): Accession number cg39709402
gcctacagagaggaatcgcaaaaatgcctgaaagaattccaggaaaacaca

SEQ ID NO: 815 - DNA, 51 bp, Homo sapiens
  allele (26)...(0): single nucleotide polymorphism
  misc_feature (0)...(0): Accession number cg39709402
gatgctggaggacttcaagaaagacgtgaagaactcccttagagaaacaca

SEQ ID NO: 816 - DNA, 51 bp, Homo sapiens
  allele (26)...(0): single nucleotide polymorphism
  misc_feature (0)...(0): Accession number cg39709402
aaagacatgaagaactcccttagaggaacacaggaaaacattaataaacaa

SEQ ID NO: 817 - DNA, 51 bp, Homo sapiens
  allele (26)...(0): single nucleotide polymorphism
  misc_feature (0)...(0): Accession number cg39709402
cttagagaaacacaggaaaacattagtaaacaagtagaagcctacagagag

SEQ ID NO: 818 - DNA, 51 bp, Homo sapiens
  allele (26)...(0): single nucleotide polymorphism
  misc_feature (0)...(0): Accession number cg39709402
tagagaaacacaggaaaacattaatgaacaagtagaagcctacagagagga

SEQ ID NO: 819 - DNA, 51 bp, Homo sapiens
  allele (26)...(0): single nucleotide polymorphism
  misc_feature (0)...(0): Accession number cg43950268
tttgctatgtcctccttgacctcctactcggtggcggtcacaatgccctcc

SEQ ID NO: 820 - DNA, 51 bp, Homo sapiens
  allele (26)...(0): single nucleotide polymorphism
  misc_feature (0)...(0): Accession number cg43985169
aagacgaatgggtggtggtagagatcctgaagaaatggaaatagatggtga

SEQ ID NO: 821 - DNA, 51 bp, Homo sapiens
  allele (26)...(0): single nucleotide polymorphism
  misc_feature (0)...(0): Accession number cg43997616
aaagccagcggagccgtaagcatcacactgcttcctcttcacctcatcact

SEQ ID NO: 822 - DNA, 51 bp, Homo sapiens
  allele (26)...(0): single nucleotide polymorphism
  misc_feature (0)...(0): Accession number cg43319420
cacgacaactacagaaacaacccctcccacaacttccggcactgcttctgc

SEQ ID NO: 823 - DNA, 51 bp, Homo sapiens
  allele (26)...(0): single nucleotide polymorphism
  misc_feature (0)...(0): Accession number cg44034764
gaggtccaggctgggcaggacagtccccccatggtgccgtaacagcctctt

SEQ ID NO: 824 - DNA, 51 bp, Homo sapiens
  allele (26)...(0): single nucleotide polymorphism
  misc_feature (0)...(0): Accession number cg43991224
tctcatctgtctacctacagcctggattgggtcatggcagcagtggtgctg

SEQ ID NO: 825 - DNA, 51 bp, Homo sapiens
  allele (26)...(0): single nucleotide polymorphism
  misc_feature (0)...(0): Accession number cg44018623
taccatctctgtttttaccactggtagctctgaacaacaaataatttgtgg

SEQ ID NO: 826 - DNA, 51 bp, Homo sapiens
  allele (26)...(0): single nucleotide polymorphism
  misc_feature (0)...(0): Accession number cg38924741
aaagaggagaatggtgactttgcctcattcagagtggaacgagctgaaagg

SEQ ID NO: 827 - DNA, 51 bp, Homo sapiens
  allele (26)...(0): single nucleotide polymorphism
  misc_feature (0)...(0): Accession number cg43322513
ttcctgttcttcacatggtgagccctgccctgctgtctgcttgcattcggg

SEQ ID NO: 828 - DNA, 51 bp, Homo sapiens
  allele (26)...(0): single nucleotide polymorphism
  misc_feature (0)...(0): Accession number cg44913214
gaacacaacaaagaaaaaacagagtttgggactcatccaaaagggacgaga

SEQ ID NO: 829 - DNA, 51 bp, Homo sapiens
  allele (26)...(0): single nucleotide polymorphism
  misc_feature (0)...(0): Accession number cg39529972
ttggcctcgacatcattccctgacggggacttaaagggtagcaattcgtat

SEQ ID NO: 830 - DNA, 51 bp, Homo sapiens
  allele (26)...(0): single nucleotide polymorphism
  misc_feature (0)...(0): Accession number cg43925670
tagtttgcccaaaccagcatcacctgggaacttttcttccatcaagtcagc

SEQ ID NO: 831 - DNA, 51 bp, Homo sapiens
  allele (26)...(0): single nucleotide polymorphism
  misc_feature (0)...(0): Accession number cg43925670
tttgtcatactcttctctcatttttgaattaagttttaaatcgttgctcag

SEQ ID NO: 832 - DNA, 51 bp, Homo sapiens
  allele (26)...(0): single nucleotide polymorphism
  misc_feature (0)...(0): Accession number cg43925670
cctctaatccttttagtagaacaattttcttgtatttttttcccatcttta

SEQ ID NO: 833 - DNA, 51 bp, Homo sapiens
  allele (26)...(0): single nucleotide polymorphism
  misc_feature (0)...(0): Accession number cg43925670
cttttagtagaacaatgttcttgtagttttttcccatctttacagacataa

SEQ ID NO: 834 - DNA, 51 bp, Homo sapiens
  allele (26)...(0): single nucleotide polymorphism
  misc_feature (0)...(0): Accession number cg43331742
tcctcgaggtgcttcccacagactcaatttctgagttttccacagaaaaga

SEQ ID NO: 835 - DNA, 51 bp, Homo sapiens
  allele (26)...(0): single nucleotide polymorphism
  misc_feature (0)...(0): Accession number cg43253796
gaaatggatcttatttggactttgctacaagactgccgagagattttccca

SEQ ID NO: 836 - DNA, 51 bp, Homo sapiens
  allele (26)...(0): single nucleotide polymorphism
  misc_feature (0)...(0): Accession number cg43257400
gacatcagcatggctgcccccgactccagcagaacatgatcattctctgac

SEQ ID NO: 837 - DNA, 51 bp, Homo sapiens
  allele (26)...(0): single nucleotide polymorphism
  misc_feature (0)...(0): Accession number cg43974480
tcacggactttggactgtccaaaattggcctcatgagcctgacaacgaact

SEQ ID NO: 838 - DNA, 51 bp, Homo sapiens
  allele (26)...(0): single nucleotide polymorphism
  misc_feature (0)...(0): Accession number cg43922705
caaaccggctttctccatggtgccccgccaaaccctggagttcccaggctg

SEQ ID NO: 839 - DNA, 51 bp, Homo sapiens
  allele (26)...(0): single nucleotide polymorphism
  misc_feature (0)...(0): Accession number cg38438124
tgcaaaaactgttaaacatggcgctcgcgcggagatctccaccgtgaaccc

SEQ ID NO: 840 - DNA, 51 bp, Homo sapiens
  allele (26)...(0): single nucleotide polymorphism
  misc_feature (0)...(0): Accession number cg42703622
gtatgcagcaacaagagcaactctggagaaggaatttggaggtggccacat

SEQ ID NO: 841 - DNA, 51 bp, Homo sapiens
  allele (26)...(0): single nucleotide polymorphism
  misc_feature (0)...(0): Accession number cg42703622
acaagagcaactctgaagaaggaatctggaggtggccacattaaagatgaa

SEQ ID NO: 842 - DNA, 51 bp, Homo sapiens
  allele (26)...(0): single nucleotide polymorphism
  misc_feature (0)...(0): Accession number cg41501665
gagtacaccatcaagtcgcactccaacttgccgcccaacaacagctacgcc

SEQ ID NO: 843 - DNA, 51 bp, Homo sapiens
  allele (26)...(0): single nucleotide polymorphism
  misc_feature (0)...(0): Accession number cg25143358
gctttatgggtatcgacatccaatgtgtcgatgtcctccacaacctccacg

SEQ ID NO: 844 - DNA, 51 bp, Homo sapiens
  allele (26)...(0): single nucleotide polymorphism
  misc_feature (0)...(0): Accession number cg29023997
tgcatggtttccattttcaatctgggtgggatggagcaccatgtgcgcacc

SEQ ID NO: 845 - DNA, 51 bp, Homo sapiens
  allele (26)...(0): single nucleotide polymorphism
  misc_feature (0)...(0): Accession number cg43975720
catccacccagcccaagatgaccggcccttttaccaatttgaggctgcgtg

SEQ ID NO: 846 - DNA, 51 bp, Homo sapiens
  allele (26)...(0): single nucleotide polymorphism
  misc_feature (0)...(0): Accession number cg44013875
gccatggagaggctgcaggagacagggaagattatagctgagctgaacgag

SEQ ID NO: 847 - DNA, 51 bp, Homo sapiens
  allele (26)...(0): single nucleotide polymorphism
  misc_feature (0)...(0): Accession number cg44009224
tttggatcctgaaaatgttgtatttcatgttggaggttacccacctgattt

SEQ ID NO: 848 - DNA, 51 bp, Homo sapiens
  allele (26)...(0): single nucleotide polymorphism
  misc_feature (0)...(0): Accession number cg42930646
tgatgcggatagcgtatggatggaagtggacgatgaggaggacctgccttc

SEQ ID NO: 849 - DNA, 51 bp, Homo sapiens
  allele (26)...(0): single nucleotide polymorphism
  misc_feature (0)...(0): Accession number cg43935885
ccagacagcaccactggaacccctcttagcagcgcaccagacccgaagaac

SEQ ID NO: 850 - DNA, 51 bp, Homo sapiens
  allele (26)...(0): single nucleotide polymorphism
  misc_feature (0)...(0): Accession number cg42928872
gagctgcagaggaggctggaccagttcattgggaagccctcactgttcatc

SEQ ID NO: 851 - DNA, 51 bp, Homo sapiens
  allele (26)...(0): single nucleotide polymorphism
  misc_feature (0)...(0): Accession number cg44019843
gagtgacccgcctccctggtccaagtatgtggagtacaccttcacagggat

SEQ ID NO: 852 - DNA, 51 bp, Homo sapiens
  allele (26)...(0): single nucleotide polymorphism
  misc_feature (0)...(0): Accession number cg44128805
agtgcacacagtgagctcagagctttcccctgaaaaccgaaagtttcaact

SEQ ID NO: 853 - DNA, 51 bp, Homo sapiens
  allele (26)...(0): single nucleotide polymorphism
  misc_feature (0)...(0): Accession number cg38642684
tttctgataatcatttaaggtatgttagttgctagtatttaatttaacctt

SEQ ID NO: 854 - DNA, 51 bp, Homo sapiens
  allele (26)...(0): single nucleotide polymorphism
  misc_feature (0)...(0): Accession number cg38642684
ctttttcaggtgcaatgattaaacctcttaactgtgcattccttatgacag

SEQ ID NO: 855 - DNA, 51 bp, Homo sapiens
  allele (26)...(0): single nucleotide polymorphism
  misc_feature (0)...(0): Accession number cg44913844
ccagttggtaaactggtcttaaaccagaatccagttaattactttgctgag

SEQ ID NO: 856 - DNA, 51 bp, Homo sapiens
  allele (26)...(0): single nucleotide polymorphism
  misc_feature (0)...(0): Accession number cg40084915
cctgcggtctggggagatgagggccccaaacagcacctgatattcattggg

SEQ ID NO: 857 - DNA, 51 bp, Homo sapiens
  allele (26)...(0): single nucleotide polymorphism
  misc_feature (0)...(0): Accession number cg42720088
aaagctcagagagatctgggctatgtgccacttgtcagctgggaggaagcc

SEQ ID NO: 858 - DNA, 51 bp, Homo sapiens
  allele (26)...(0): single nucleotide polymorphism
  misc_feature (0)...(0): Accession number cg43957486
cgctcctgcaccgcatccgcgacgctgtcctgcaacgacctctgcgagcac

SEQ ID NO: 859 - DNA, 51 bp, Homo sapiens
  allele (26)...(0): single nucleotide polymorphism
  misc_feature (0)...(0): Accession number cg40148056
ctcagagacccctaacaacccagcacccacagagcggaacacttaaggatc

SEQ ID NO: 860 - DNA, 51 bp, Homo sapiens
  allele (26)...(0): single nucleotide polymorphism
  misc_feature (0)...(0): Accession number cg43981852
cacctcctccagcttcccagcctcctcggctctggccaggctgccgctggg

SEQ ID NO: 861 - DNA, 51 bp, Homo sapiens
  allele (26)...(0): single nucleotide polymorphism
  misc_feature (0)...(0): Accession number cg42522566
gcagccaagatcatcaaagtgaagagcgtaaaggaccgggaggatgtgaag

SEQ ID NO: 862 - DNA, 51 bp, Homo sapiens
  allele (26)...(0): single nucleotide polymorphism
  misc_feature (0)...(0): Accession number cg43297806
atagtagccagggacaagacagcggctctgcagggagcgtagtgccagagg

SEQ ID NO: 863 - DNA, 51 bp, Homo sapiens
  allele (26)...(0): single nucleotide polymorphism
  misc_feature (0)...(0): Accession number cg43297806
tgcagggagcgtagtgccagaggggcctgggaggaggctgaaatcacctga

SEQ ID NO: 864 - DNA, 51 bp, Homo sapiens
  allele (26)...(0): single nucleotide polymorphism
  misc_feature (0)...(0): Accession number cg43987111
agtagtctgcgtctccatagagtttactcatgactgagttcttggtctgga

SEQ ID NO: 865 - DNA, 51 bp, Homo sapiens
  allele (26)...(0): single nucleotide polymorphism
  misc_feature (0)...(0): Accession number cg43976335
gaaatgcactggaccactcgggcagagctgccaggccgtagcaggcaattc

SEQ ID NO: 866 - DNA, 51 bp, Homo sapiens
  allele (26)...(0): single nucleotide polymorphism
  misc_feature (0)...(0): Accession number cg39515668
acgcacgaaccggtcatactggtcgttgatccaggaacggtcgcacagctg

SEQ ID NO: 867 - DNA, 51 bp, Homo sapiens
  allele (26)...(0): single nucleotide polymorphism
  misc_feature (0)...(0): Accession number cg44027791
gaagcgcttctgacactgggcgcacccgaagcgtttgtcccctgtgtgggt

SEQ ID NO: 868 - DNA, 51 bp, Homo sapiens
  allele (26)...(0): single nucleotide polymorphism
  misc_feature (0)...(0): Accession number cg43992817
gaggggccgctggaaggtgacactgtgttggggcccacggaggtgccgctg

SEQ ID NO: 869 - DNA, 51 bp, Homo sapiens
  allele (26)...(0): single nucleotide polymorphism
  misc_feature (0)...(0): Accession number cg43297259
taagtgtctgatgaggtgtgacttccggctaaagccttgctcacactccct

SEQ ID NO: 870 - DNA, 51 bp, Homo sapiens
  allele (26)...(0): single nucleotide polymorphism
  misc_feature (0)...(0): Accession number cg42716761
cgagaagaccctataccatcacgtggacggctgcgacgtgttccacctccg

SEQ ID NO: 871 - DNA, 51 bp, Homo sapiens
  allele (26)...(0): single nucleotide polymorphism
  misc_feature (0)...(0): Accession number cg42166807
agagcaatggctctcttcactccgtagaagttgtcctctcagaagctgggc

SEQ ID NO: 872 - DNA, 51 bp, Homo sapiens
  allele (26)...(0): single nucleotide polymorphism
  misc_feature (0)...(0): Accession number cg38869466
ttcacttgtattaacgtcctggtcccgggcttcataatggtgtcaggattt

SEQ ID NO: 873 - DNA, 51 bp, Homo sapiens
  allele (26)...(0): single nucleotide polymorphism
  misc_feature (0)...(0): Accession number cg42742340
cagagagacggtgtccatcagcatctgggcctccctgcagcagacccaggc

SEQ ID NO: 874 - DNA, 51 bp, Homo sapiens
  allele (26)...(0): single nucleotide polymorphism
  misc_feature (0)...(0): Accession number cg43976701
tggtatatctgaactgaatcagcctcctgaacttttacctcagttttctag

SEQ ID NO: 875 - DNA, 51 bp, Homo sapiens
  allele (26)...(0): single nucleotide polymorphism
  misc_feature (0)...(0): Accession number cg43920728
gtaagtctcattgtaaaattgttgcgtgagcagtgctggggagttgacagc

SEQ ID NO: 876 - DNA, 51 bp, Homo sapiens
  allele (26)...(0): single nucleotide polymorphism
  misc_feature (0)...(0): Accession number cg43920728
tgcttgctctggaagggcagagtgctgctcacctccttttagccaaagtaa

SEQ ID NO: 877 - DNA, 51 bp, Homo sapiens
  allele (26)...(0): single nucleotide polymorphism
  misc_feature (0)...(0): Accession number cg42339179
tcctccaccagggtcattttgcggtatttaaaagttccagtgatctcaatg

SEQ ID NO: 878 - DNA, 51 bp, Homo sapiens
  allele (26)...(0): single nucleotide polymorphism
  misc_feature (0)...(0): Accession number cg17663981
tgcacctgcgaccaaaaaccctgcaactgccccaaaggggatgtcaactac

SEQ ID NO: 879 - DNA, 51 bp, Homo sapiens
  allele (26)...(0): single nucleotide polymorphism
  misc_feature (0)...(0): Accession number cg43918356
gctcccgtgcacggggctgtagcgctcaggactgcccaggcctggctttgc

SEQ ID NO: 880 - DNA, 51 bp, Homo sapiens
  allele (26)...(0): single nucleotide polymorphism
  misc_feature (0)...(0): Accession number cg43924089
acctcctggagcagtcctggtgttatattccctgcccctggagttcccact

SEQ ID NO: 881 - DNA, 51 bp, Homo sapiens
  allele (26)...(0): single nucleotide polymorphism
  misc_feature (0)...(0): Accession number cg43930961
ttcttccgtagtcacagacgttaggttactgctttcggcttcaatggaaac

SEQ ID NO: 882 - DNA, 51 bp, Homo sapiens
  allele (26)...(0): single nucleotide polymorphism
  misc_feature (0)...(0): Accession number cg43966528
aacaacacattcagtacagtgcagcgtatcagcaggccaagttaaccaatc

SEQ ID NO: 883 - DNA, 51 bp, Homo sapiens
  allele (26)...(0): single nucleotide polymorphism
  misc_feature (0)...(0): Accession number cg43980727
tccttccttgtagtcagagacatcaagagagtaactggatgttagctccaa

SEQ ID NO: 884 - DNA, 51 bp, Homo sapiens
  allele (26)...(0): single nucleotide polymorphism
  misc_feature (0)...(0): Accession number cg43981483
tgactgcattattcgcagctgcttagggacaaattctaccttcttctgggt

SEQ ID NO: 885 - DNA, 51 bp, Homo sapiens
  allele (26)...(0): single nucleotide polymorphism
  misc_feature (0)...(0): Accession number cg44932392
tagatgaaggagcctgagtaagaggtcacgcaccagcctgtagaacatata

SEQ ID NO: 886 - DNA, 51 bp, Homo sapiens
  allele (26)...(0): single nucleotide polymorphism
  misc_feature (0)...(0): Accession number cg44932924
aacagtgagtcggtccagcagcagacggagttcttgaacaggcagctgttg

SEQ ID NO: 887 - DNA, 51 bp, Homo sapiens
  allele (26)...(0): single nucleotide polymorphism
  misc_feature (0)...(0): Accession number cg43985955
acctccaaacccctttggccctgtaccaggagcacagatacagtttatgta

SEQ ID NO: 888 - DNA, 51 bp, Homo sapiens
  allele (26)...(0): single nucleotide polymorphism
  misc_feature (0)...(0): Accession number cg44002507
gtcgcacttggcagccagcaggatctcggctatgtccacgcagccggagaa

SEQ ID NO: 889 - DNA, 51 bp, Homo sapiens
  allele (26)...(0): single nucleotide polymorphism
  misc_feature (0)...(0): Accession number cg44002507
tttcctttcctcttgagaaatttctccttaatgctggattccgaactcagg

SEQ ID NO: 890 - DNA, 51 bp, Homo sapiens
  allele (26)...(0): single nucleotide polymorphism
  misc_feature (0)...(0): Accession number cg44002507
cgcaggtcctggtgggccatgaacatgcgcacgggcaccaggttgggctcg

SEQ ID NO: 891 - DNA, 51 bp, Homo sapiens
  allele (26)...(0): single nucleotide polymorphism
  misc_feature (0)...(0): Accession number cg44128920
gagcagcagcgaaaacggcttcaaccgcagttggaagaacgcagtcgtgaa

SEQ ID NO: 892 - DNA, 51 bp, Homo sapiens
  allele (26)...(0): single nucleotide polymorphism
  misc_feature (0)...(0): Accession number cg43968641
tcattcatctcagggaacatatcagtcagagaaatatacaagaacattcct

SEQ ID NO: 893 - DNA, 51 bp, Homo sapiens
  allele (26)...(0): single nucleotide polymorphism
  misc_feature (0)...(0): Accession number cg43934178
acaaagtagtggaacttcctcttgagcacgtccagggtgtggcccaggacc

SEQ ID NO: 894 - DNA, 51 bp, Homo sapiens
  allele (26)...(0): single nucleotide polymorphism
  misc_feature (0)...(0): Accession number cg43934178
ccagggcatgacctccgtgaagcctagtgagaggacggtcttcccggagca

SEQ ID NO: 895 - DNA, 51 bp, Homo sapiens
  allele (26)...(0): single nucleotide polymorphism
  misc_feature (0)...(0): Accession number cg43949042
ggacgtacatgaggacggctattggatgtccgatgatgagcgacagccaca

SEQ ID NO: 896 - DNA, 51 bp, Homo sapiens
  allele (26)...(0): single nucleotide polymorphism
  misc_feature (0)...(0): Accession number cg43916582
ccttcatctttattctgctgctcaggttccatttgttcctcttgattgcgt

SEQ ID NO: 897 - DNA, 51 bp, Homo sapiens
  allele (26)...(0): single nucleotide polymorphism
  misc_feature (0)...(0): Accession number cg43258841
aactccatccacaagtccttgctgagtaatcaatcgctgagcctcatctct

SEQ ID NO: 898 - DNA, 51 bp, Homo sapiens
  allele (26)...(0): single nucleotide polymorphism
  misc_feature (0)...(0): Accession number cg43979679
gagaaggagcccgggaaagtgtgactaggagaaaccggcacccagctttgc

SEQ ID NO: 899 - DNA, 51 bp, Homo sapiens
  allele (26)...(0): single nucleotide polymorphism
  misc_feature (0)...(0): Accession number cg42202923
taccccaatggtcttcagcctctgcggcagctccgatgaggtcagctgccg

SEQ ID NO: 900 - DNA, 51 bp, Homo sapiens
  allele (26)...(0): single nucleotide polymorphism
  misc_feature (0)...(0): Accession number cg43320405
ccaggcctcgaatggacagcaccttaatgatggggtcgtggtggctcaggc

SEQ ID NO: 901 - DNA, 51 bp, Homo sapiens
  allele (26)...(0): single nucleotide polymorphism
  misc_feature (0)...(0): Accession number cg43917689
tgacaacgcaggctccaggggttgtagctgatcttctcagaactcaagcca

SEQ ID NO: 902 - DNA, 51 bp, Homo sapiens
  allele (26)...(0): single nucleotide polymorphism
  misc_feature (0)...(0): Accession number cg43922856
gagaattcagtgattggcagaatagaagatgcatgcttgaaatttccagtc

SEQ ID NO: 903 - DNA, 51 bp, Homo sapiens
  allele (26)...(0): single nucleotide polymorphism
  misc_feature (0)...(0): Accession number cg43922856
aactaaggattcgttgcttgaagcctttatagtttcagctatgggagtact

SEQ ID NO: 904 - DNA, 51 bp, Homo sapiens
  allele (26)...(0): single nucleotide polymorphism
  misc_feature (0)...(0): Accession number cg43955639
cgtgtggcaggcatggtgatgagggatgctggggccagggaggtggcagga

SEQ ID NO: 905 - DNA, 51 bp, Homo sapiens
  allele (26)...(0): single nucleotide polymorphism
  misc_feature (0)...(0): Accession number cg43950766
aggaatgaccaaagcacctgggtcacacttgtccacccactctttaatttt

SEQ ID NO: 906 - DNA, 51 bp, Homo sapiens
  allele (26)...(0): single nucleotide polymorphism
  misc_feature (0)...(0): Accession number cg43985159
acttctgccttcagctgcaaacccaaaggacggcatccgaggactgaacgc

SEQ ID NO: 907 - DNA, 51 bp, Homo sapiens
  allele (26)...(0): single nucleotide polymorphism
  misc_feature (0)...(0): Accession number cg41022625
cgtcttctccatcattcacatcatctccaccctgctcctcagcacgcagct

SEQ ID NO: 908 - DNA, 51 bp, Homo sapiens
  allele (26)...(0): single nucleotide polymorphism
  misc_feature (0)...(0): Accession number cg44002669
accttgcgcttgcactcgcggcagctcctgtccagttcctccttctccttc

SEQ ID NO: 909 - DNA, 51 bp, Homo sapiens
  allele (26)...(0): single nucleotide polymorphism
  misc_feature (0)...(0): Accession number cg44128902
ccgggatcgagacagagacagagagggggacagggatcgggatcgggatcg

SEQ ID NO: 910 - DNA, 51 bp, Homo sapiens
  allele (26)...(0): single nucleotide polymorphism
  misc_feature (0)...(0): Accession number cg44129213
gggtgtggactggctgcagatgtcacttgtaattcagattctttctggcga

SEQ ID NO: 911 - DNA, 51 bp, Homo sapiens
  allele (26)...(0): single nucleotide polymorphism
  misc_feature (0)...(0): Accession number cg43996402
cttctccggctcctttcctccctgcagtggcttctgctgctcccctccttt

SEQ ID NO: 912 - DNA, 51 bp, Homo sapiens
  allele (26)...(0): single nucleotide polymorphism
  misc_feature (0)...(0): Accession number cg43984909
cgaatatcagctgcatccagtgtcctcagacgagaatacaagccaaggcct

SEQ ID NO: 913 - DNA, 51 bp, Homo sapiens
  allele (26)...(0): single nucleotide polymorphism
  misc_feature (0)...(0): Accession number cg42910688
gacagaggacattcccataattttgtttggcaacaaaagtgacttagtgcg

SEQ ID NO: 914 - DNA, 51 bp, Homo sapiens
  allele (26)...(0): single nucleotide polymorphism
  misc_feature (0)...(0): Accession number cg43950590
aagaatcctccgacggcttcgttactatcctgtctgaagcggattgcacga

SEQ ID NO: 915 - DNA, 51 bp, Homo sapiens
  allele (26)...(0): single nucleotide polymorphism
  misc_feature (0)...(0): Accession number cg44931503
ttttaaagagttcatataatcataggggtcttcaaataccgttgttccttc

SEQ ID NO: 916 - DNA, 51 bp, Homo sapiens
  allele (26)...(0): single nucleotide polymorphism
  misc_feature (0)...(0): Accession number cg43303845
acattgcctagacaaaactcacaaccacctgctcaagttcaaaatggccca

SEQ ID NO: 917 - DNA, 51 bp, Homo sapiens
  allele (26)...(0): single nucleotide polymorphism
  misc_feature (0)...(0): Accession number cg43973762
agctgaacaacagaagttgtggaattaggagttaaaatatgccagaggcaa

SEQ ID NO: 918 - DNA, 51 bp, Homo sapiens
  allele (26)...(0): single nucleotide polymorphism
  misc_feature (0)...(0): Accession number cg43973762
caaagaagcgattgaaacacaattaccagagtatcacaaattggctagaaa

SEQ ID NO: 919 - DNA, 51 bp, Homo sapiens
  allele (26)...(0): single nucleotide polymorphism
  misc_feature (0)...(0): Accession number cg43973762
gccctaaataaaaaaatgggtttgggggatactttagaacaattgaatgca

SEQ ID NO: 920 - DNA, 51 bp, Homo sapiens
  allele (26)...(0): single nucleotide polymorphism
  misc_feature (0)...(0): Accession number cg42910848
ccatggtgccaggccgtgctccccacgtgcctccggggtgctgaagatctt

SEQ ID NO: 921 - DNA, 51 bp, Homo sapiens
  allele (26)...(0): single nucleotide polymorphism
  misc_feature (0)...(0): Accession number cg29351416
tttcccaaaagttccaagtagacaagagtaatcgcctgttactgcagcagg

SEQ ID NO: 922 - DNA, 51 bp, Homo sapiens
  allele (26)...(0): single nucleotide polymorphism
  misc_feature (0)...(0): Accession number cg29351416
gttactgcagcaggtctcattaccatacattcctgggaactataccgtcag

SEQ ID NO: 923 - DNA, 51 bp, Homo sapiens
  allele (26)...(0): single nucleotide polymorphism
  misc_feature (0)...(0): Accession number cg43938372
ttgtttcccacttaatttatttttttctgcttgttcttcttctttcatcct

SEQ ID NO: 924 - DNA, 51 bp, Homo sapiens
  allele (26)...(0): single nucleotide polymorphism
  misc_feature (0)...(0): Accession number cg44930828
cctcaaggtttcgctgccgaagcttaccaacgtgcagctcctggataccga

SEQ ID NO: 925 - DNA, 51 bp, Homo sapiens
  allele (26)...(0): single nucleotide polymorphism
  misc_feature (0)...(0): Accession number cg44930828
cttgccaacgtgcagctcctggatatcgacgggggttttgtgcactcggac

SEQ ID NO: 926 - DNA, 51 bp, Homo sapiens
  allele (26)...(0): single nucleotide polymorphism
  misc_feature (0)...(0): Accession number cg44035718
ctggagtaccaggaagaactgaggttccactacaaggacatgctcagcgaa

SEQ ID NO: 927 - DNA, 51 bp, Homo sapiens
  allele (26)...(0): single nucleotide polymorphism
  misc_feature (0)...(0): Accession number cg44921277
ttggcgcaacttccccatcaccttcacctgctatgcggccctcttctgcct

SEQ ID NO: 928 - DNA, 51 bp, Homo sapiens
  allele (26)...(0): single nucleotide polymorphism
  misc_feature (0)...(0): Accession number cg43250166
gccgtgatttgctccagtgccatcttgtgcagatgctcatctcggctctcg

SEQ ID NO: 929 - DNA, 51 bp, Homo sapiens
  allele (26)...(0): single nucleotide polymorphism
  misc_feature (0)...(0): Accession number cg39512856
ctttttccaggcttccagcaacgagatttcttccttcgttgcaatttccag

SEQ ID NO: 930 - DNA, 51 bp, Homo sapiens
  allele (26)...(0): single nucleotide polymorphism
  misc_feature (0)...(0): Accession number cg39512856
gccgttccacttctgatattccccttccggcgataaccaggtaaaattttc

SEQ ID NO: 931 - DNA, 51 bp, Homo sapiens
  allele (26)...(0): single nucleotide polymorphism
  misc_feature (0)...(0): Accession number cg39512856
tcccctcccggcgataaccaggtaacattttccggtaacggaccgagttca

SEQ ID NO: 932 - DNA, 51 bp, Homo sapiens
  allele (26)...(0): single nucleotide polymorphism
  misc_feature (0)...(0): Accession number cg39512856
tggtcttcaacgagatgccacgatgactcatcactgttgaaaacagccaca

SEQ ID NO: 933 - DNA, 51 bp, Homo sapiens
  allele (26)...(0): single nucleotide polymorphism
  misc_feature (0)...(0): Accession number cg39570960
gcctccaggaagtcgtttgtgtttgggctgaacgaatgtgcgtccagccgc

SEQ ID NO: 934 - DNA, 51 bp, Homo sapiens
  allele (26)...(0): single nucleotide polymorphism
  misc_feature (0)...(0): Accession number cg43980391
agtaaatggacaagaatatcatctttaacttgtagacacagccgggcaaga

SEQ ID NO: 935 - DNA, 51 bp, Homo sapiens
  allele (26)...(0): single nucleotide polymorphism
  misc_feature (0)...(0): Accession number cg43983527
ttctggaaggatggtgcaccctggttcggccgccattactgcgagagtctg

SEQ ID NO: 936 - DNA, 51 bp, Homo sapiens
  allele (26)...(0): single nucleotide polymorphism
  misc_feature (0)...(0): Accession number cg42341305
gatgaatattcgagtacagacacactgtatcccggcagcctacctccagaa

SEQ ID NO: 937 - DNA, 51 bp, Homo sapiens
  allele (26)...(0): single nucleotide polymorphism
  misc_feature (0)...(0): Accession number cg43980889
cttctattttgaattctaaagaccagttacaagtagaaaatgatgcttacc

SEQ ID NO: 938 - DNA, 51 bp, Homo sapiens
  allele (26)...(0): single nucleotide polymorphism
  misc_feature (0)...(0): Accession number cg43980889
tattttgaattctaaagaccatttataagtagaaaatgatgcttaccctgg

SEQ ID NO: 939 - DNA, 51 bp, Homo sapiens
  allele (26)...(0): single nucleotide polymorphism
  misc_feature (0)...(0): Accession number cg43980889
gcttaccctggtaccgatagaacagcaaatgttaaatatagacaagtggac

SEQ ID NO: 940 - DNA, 51 bp, Homo sapiens
  allele (26)...(0): single nucleotide polymorphism
  misc_feature (0)...(0): Accession number cg29349483
gcagtttttcaccaagatcaagacctctgaccaccagtacatggagggctt

SEQ ID NO: 941 - DNA, 51 bp, Homo sapiens
  allele (26)...(0): single nucleotide polymorphism
  misc_feature (0)...(0): Accession number cg43918287
tctatggcatcatcctgcatgaccatttgtgcatctaaaccagcccagccg

SEQ ID NO: 942 - DNA, 51 bp, Homo sapiens
  allele (26)...(0): single nucleotide polymorphism
  misc_feature (0)...(0): Accession number cg43918287
catcctgcatgaccacttgtgcatcgaaaccagcccagccgccaaccccca

SEQ ID NO: 943 - DNA, 51 bp, Homo sapiens
  allele (26)...(0): single nucleotide polymorphism
  misc_feature (0)...(0): Accession number cg43918287
taaaccagcccagccgccaacccccgaaagttggtctgcagttatattaat

SEQ ID NO: 944 - DNA, 51 bp, Homo sapiens
  allele (26)...(0): single nucleotide polymorphism
  misc_feature (0)...(0): Accession number cg43918287
caacccccaaaagttggtctgcagtcatattaatttgaggttggacctggg

SEQ ID NO: 945 - DNA, 51 bp, Homo sapiens
  allele (26)...(0): single nucleotide polymorphism
  misc_feature (0)...(0): Accession number cg37027086
gaatcagaactacaaggatcaattaccccagctcaatgtcagggttcttca

SEQ ID NO: 946 - DNA, 51 bp, Homo sapiens
  allele (26)...(0): single nucleotide polymorphism
  misc_feature (0)...(0): Accession number cg42688841
attataactgggatcccagtcaacaaaaggtagaatttcattaacctcaag

SEQ ID NO: 947 - DNA, 51 bp, Homo sapiens
  allele (26)...(0): single nucleotide polymorphism
  misc_feature (0)...(0): Accession number cg42688841
ccgagcctagtgccagcgcggcggccagacagagctgtcagagcggcgacc

SEQ ID NO: 948 - DNA, 51 bp, Homo sapiens
  allele (26)...(0): single nucleotide polymorphism
  misc_feature (0)...(0): Accession number cg40332814
actgcacagggaccgaatctctgccccccgctctgcagccaggtgctccaa

SEQ ID NO: 949 - DNA, 51 bp, Homo sapiens
  allele (26)...(0): single nucleotide polymorphism
  misc_feature (0)...(0): Accession number cg43920571
gcgtttttctctcacgtccgtctgaaatttactgaggaatattgtgctggc

SEQ ID NO: 950 - DNA, 51 bp, Homo sapiens
  allele (26)...(0): single nucleotide polymorphism
  misc_feature (0)...(0): Accession number cg44024149
ggaagccgcactcagttatggcttccacggctgccactgtggcgtgggtgg

SEQ ID NO: 951 - DNA, 51 bp, Homo sapiens
  allele (26)...(0): single nucleotide polymorphism
  misc_feature (0)...(0): Accession number cg43307245
gatatgatagcttgtcctgaaactgggactcctgccgtgataacgtgtgac

SEQ ID NO: 952 - DNA, 51 bp, Homo sapiens
  allele (26)...(0): single nucleotide polymorphism
  misc_feature (0)...(0): Accession number cg39523553
gtgtgaggtctgcccgatccgggatagctgccggtgggtgatcgacggtag

SEQ ID NO: 953 - DNA, 51 bp, Homo sapiens
  allele (26)...(0): single nucleotide polymorphism
  misc_feature (0)...(0): Accession number cg39523553
atggctctttccgcctggcccgagcccgatcaggcatcaaggtgcctggaa

SEQ ID NO: 954 - DNA, 51 bp, Homo sapiens
  allele (26)...(0): single nucleotide polymorphism
  misc_feature (0)...(0): Accession number cg35933325
accaaatgccactattttttctccccttgcgaaaaatgaaggaaatcacgt

SEQ ID NO: 955 - DNA, 51 bp, Homo sapiens
  allele (26)...(0): single nucleotide polymorphism
  misc_feature (0)...(0): Accession number cg41677120
cacgacccacgagatcatggggcccgagaaaaagcacctggactacttaat

SEQ ID NO: 956 - DNA, 51 bp, Homo sapiens
  allele (26)...(0): single nucleotide polymorphism
  misc_feature (0)...(0): Accession number cg41677120
cccacgagatcatggggcccaagaacaagcacctggactacttaattcagt

SEQ ID NO: 957 - DNA, 51 bp, Homo sapiens
  allele (26)...(0): single nucleotide polymorphism
  misc_feature (0)...(0): Accession number cg41677120
cacaaatgagatgaatgtgaacatctcacagttggcagacagtttatttga

SEQ ID NO: 958 - DNA, 51 bp, Homo sapiens
  allele (26)...(0): single nucleotide polymorphism
  misc_feature (0)...(0): Accession number cg39648832
tgcagcctcgtcctcctcctctggctggctctgcacactctgctcctggta

SEQ ID NO: 959 - DNA, 51 bp, Homo sapiens
  allele (26)...(0): single nucleotide polymorphism
  misc_feature (0)...(0): Accession number cg42696021
gacacccgcacccgggcatgcttcagacagtggctgtgccgccttcacaat

SEQ ID NO: 960 - DNA, 51 bp, Homo sapiens
  allele (26)...(0): single nucleotide polymorphism
  misc_feature (0)...(0): Accession number cg42696021
acccgggcatgcttcacacagtggccgtgccgccttcacaatgaagtgaac

SEQ ID NO: 961 - DNA, 51 bp, Homo sapiens
  allele (26)...(0): single nucleotide polymorphism
  misc_feature (0)...(0): Accession number cg34243633
cagagataatgcaggccagggaggacattgcactggatgtcaccatcatgg

SEQ ID NO: 962 - DNA, 51 bp, Homo sapiens
  allele (26)...(0): single nucleotide polymorphism
  misc_feature (0)...(0): Accession number cg34243633
accgacataagaacttgttttccagttggggagcagcatggcaaccagtgt

SEQ ID NO: 963 - DNA, 51 bp, Homo sapiens
  allele (26)...(0): single nucleotide polymorphism
  misc_feature (0)...(0): Accession number cg43942922
cctgagctccagccttccacctccagagaccagcctgtcacctctgagccc

SEQ ID NO: 964 - DNA, 51 bp, Homo sapiens
  allele (26)...(0): single nucleotide polymorphism
  misc_feature (0)...(0): Accession number cg43942922
cagccttccacctccacagaccagcttgtcacctctgagcccacatctcag

SEQ ID NO: 965 - DNA, 51 bp, Homo sapiens
  allele (26)...(0): single nucleotide polymorphism
  misc_feature (0)...(0): Accession number cg43942922
cacctccacagaccagcctgtcacccctgagcccacatctcaggccactag

SEQ ID NO: 966 - DNA, 51 bp, Homo sapiens
  allele (26)...(0): single nucleotide polymorphism
  misc_feature (0)...(0): Accession number cg43942922
cctgtcacctctgagcccacatctcgggccactaggggaagaaaaaatagg

SEQ ID NO: 967 - DNA, 51 bp, Homo sapiens
  allele (26)...(0): single nucleotide polymorphism
  misc_feature (0)...(0): Accession number cg35133436
ttctctagtccaccaggaggctacagctcggctctcagggtcaggtaatga

SEQ ID NO: 968 - DNA, 51 bp, Homo sapiens
  allele (26)...(0): single nucleotide polymorphism
  misc_feature (0)...(0): Accession number cg44938009
gagtgcacgcataaagatggaagagtatgcactactttctgatccagtgga

SEQ ID NO: 969 - DNA, 51 bp, Homo sapiens
  allele (26)...(0): single nucleotide polymorphism
  misc_feature (0)...(0): Accession number cg43949821
attttaattccttcctgtctacggcagttggacctcctggctctctgctgt

SEQ ID NO: 970 - DNA, 51 bp, Homo sapiens
  allele (26)...(0): single nucleotide polymorphism
  misc_feature (0)...(0): Accession number cg39516123
tggcttcggctggcgggccatcaattccagcatggctgcccccagcagtcc

SEQ ID NO: 971 - DNA, 51 bp, Homo sapiens
  allele (26)...(0): single nucleotide polymorphism
  misc_feature (0)...(0): Accession number cg42731307
cgaaaagcaaagtgcagtttgttgcctcggctgttgagtggttcgggtcca

SEQ ID NO: 972 - DNA, 51 bp, Homo sapiens
  allele (26)...(0): single nucleotide polymorphism
  misc_feature (0)...(0): Accession number cg42731307
tctggaaagaaggcattgatgatccagtcccccagtgggttgatggcaagt

SEQ ID NO: 973 - DNA, 51 bp, Homo sapiens
  allele (26)...(0): single nucleotide polymorphism
  misc_feature (0)...(0): Accession number cg42731307
gggttgatggcaagttctggaatcccctggaaatcttcccggctgagagtc

SEQ ID NO: 974 - DNA, 51 bp, Homo sapiens
  allele (26)...(0): single nucleotide polymorphism
  misc_feature (0)...(0): Accession number cg44910937
tgcctttggaacaggaatatgaaaataaactcagagccgagttagtggaaa

SEQ ID NO: 975 - DNA, 51 bp, Homo sapiens
  allele (26)...(0): single nucleotide polymorphism
  misc_feature (0)...(0): Accession number cg43335624
tcgaaaggaagtgagtgcagatggggagaccatcactgtcactttctttaa

SEQ ID NO: 976 - DNA, 51 bp, Homo sapiens
  allele (26)...(0): single nucleotide polymorphism
  misc_feature (0)...(0): Accession number cg43277268
cgctaatgccaagaaggagatggtgagctccaagctgcccaacagtgtgct

SEQ ID NO: 977 - DNA, 51 bp, Homo sapiens
  allele (26)...(0): single nucleotide polymorphism
  misc_feature (0)...(0): Accession number cg44128084
cttgacatccagccagacggttcaggatcagcggttctgtggtgcgacggg

SEQ ID NO: 978 - DNA, 51 bp, Homo sapiens
  allele (26)...(0): single nucleotide polymorphism
  misc_feature (0)...(0): Accession number cg30455661
ttctcaagtggtttgaagtcaaacatatttcaacagaagaaatcagccctc

SEQ ID NO: 979 - DNA, 51 bp, Homo sapiens
  allele (26)...(0): single nucleotide polymorphism
  misc_feature (0)...(0): Accession number cg42747615
tgtgataaaagtcactttcaggccactcacagcgaatcttcagacactttt

SEQ ID NO: 980 - DNA, 51 bp, Homo sapiens
  allele (26)...(0): single nucleotide polymorphism
  misc_feature (0)...(0): Accession number cg43153425
acaaattactatgggttctactgaagctcgggttgactacatgggctcaag

SEQ ID NO: 981 - DNA, 51 bp, Homo sapiens
  allele (26)...(0): single nucleotide polymorphism
  misc_feature (0)...(0): Accession number cg43968980
tattttctgcttctctaacagctgaatgtgaattgcttccttggactgaag

SEQ ID NO: 982 - DNA, 51 bp, Homo sapiens
  allele (26)...(0): single nucleotide polymorphism
  misc_feature (0)...(0): Accession number cg30384142
gatagtggtgtgtggtgatgcgagttaacctgacgaatggttagctgaaat

SEQ ID NO: 983 - DNA, 51 bp, Homo sapiens
  allele (26)...(0): single nucleotide polymorphism
  misc_feature (0)...(0): Accession number cg43957773
gggctcaccgtagagcaactgcaatagctctgggcctgggcctggacagga

SEQ ID NO: 984 - DNA, 51 bp, Homo sapiens
  allele (26)...(0): single nucleotide polymorphism
  misc_feature (0)...(0): Accession number cg43931038
agggcaacttgtgggcaacctggtccaggaaaccttgacttcttcaaattc

SEQ ID NO: 985 - DNA, 51 bp, Homo sapiens
  allele (26)...(0): single nucleotide polymorphism
  misc_feature (0)...(0): Accession number cg43931038
cctccccccatgcgatgcccaacacctttgcgagtgatgggcttgaaaggg

SEQ ID NO: 986 - DNA, 51 bp, Homo sapiens
  allele (26)...(0): single nucleotide polymorphism
  misc_feature (0)...(0): Accession number cg43971060
cccacctcgttcgtgctcccacccttcccagctccaccgcctggtcttcag

SEQ ID NO: 987 - DNA, 51 bp, Homo sapiens
  allele (26)...(0): single nucleotide polymorphism
  misc_feature (0)...(0): Accession number cg44010070
ttctctgccggcacctacccgcgccgggaggagtaccgccggggcatctta

SEQ ID NO: 988 - DNA, 51 bp, Homo sapiens
  allele (26)...(0): single nucleotide polymorphism
  misc_feature (0)...(0): Accession number cg43298242
tctgttggcagggctcacagagacgagggtgaggggagagatcgtgggttc

SEQ ID NO: 989 - DNA, 51 bp, Homo sapiens
  allele (26)...(0): single nucleotide polymorphism
  misc_feature (0)...(0): Accession number cg43298242
agagacgggggtgaggggagagatcatgggttcatgagatcccatcttggg

SEQ ID NO: 990 - DNA, 50 bp, Homo sapiens
  allele (26)...(0): single nucleotide polymorphism
  misc_feature (25)...(26): Nucleotide deleted between bases 25 and 26
  misc_feature (0)...(0): Accession number cg43300636
ccacagccgccacgcccacctcccgcccaggcccaggcctatgcgcatca

SEQ ID NO: 991 - DNA, 50 bp, Homo sapiens
  allele (26)...(0): single nucleotide polymorphism
  misc_feature (25)...(26): Nucleotide deleted between bases 25 and 26
  misc_feature (0)...(0): Accession number cg43300636
ccgccacgcccacctcccggcccagcccaggcctatgcgcatcaccatgg

SEQ ID NO: 992 - DNA, 50 bp, Homo sapiens
  allele (26)...(0): single nucleotide polymorphism
  misc_feature (25)...(26): Nucleotide deleted between bases 25 and 26
  misc_feature (0)...(0): Accession number cg43250373
ctgtggggttgacccagaacaaagcttgccagaaaacgttaagtatggga

SEQ ID NO: 993 - DNA, 50 bp, Homo sapiens
  allele (26)...(0): single nucleotide polymorphism
  misc_feature (25)...(26): Nucleotide deleted between bases 25 and 26
  misc_feature (0)...(0): Accession number cg43132502
ggccccagtgcagtgggtggcaccgcgaggctgctgttacggctcatctt

SEQ ID NO: 994 - DNA, 50 bp, Homo sapiens
  allele (26)...(0): single nucleotide polymorphism
  misc_feature (25)...(26): Nucleotide deleted between bases 25 and 26
  misc_feature (0)...(0): Accession number cg42528468
gctcctgcctgggaacaaccggaagtgtatgaactgagcaatgtgcaaga

SEQ ID NO: 995 - DNA, 50 bp, Homo sapiens
  allele (26)...(0): single nucleotide polymorphism
  misc_feature (25)...(26): Nucleotide deleted between bases 25 and 26
  misc_feature (0)...(0): Accession number cg43264626
tttgccagttttcttcttgagttggcctccagggcacccacagagctaaa

SEQ ID NO: 996 - DNA, 50 bp, Homo sapiens
  allele (26)...(0): single nucleotide polymorphism
  misc_feature (25)...(26): Nucleotide deleted between bases 25 and 26
  misc_feature (0)...(0): Accession number cg43132668
cgatgcgtgccagggtgattccggagcccgctggtgtgtgaggaccaagc

SEQ ID NO: 997 - DNA, 50 bp, Homo sapiens
  allele (26)...(0): single nucleotide polymorphism
  misc_feature (25)...(26): Nucleotide deleted between bases 25 and 26
  misc_feature (0)...(0): Accession number cg43132668
gatgcgtgccagggtgattccggagcccgctggtgtgtgaggaccaagct

SEQ ID NO: 998 - DNA, 50 bp, Homo sapiens
  allele (26)...(0): single nucleotide polymorphism
  misc_feature (25)...(26): Nucleotide deleted between bases 25 and 26
  misc_feature (0)...(0): Accession number cg44924334
aaagctaattgagacctatttctccaaaactaccaagactatgagtatct

SEQ ID NO: 999 - DNA, 50 bp, Homo sapiens
  allele (26)...(0): single nucleotide polymorphism
  misc_feature (25)...(26): Nucleotide deleted between bases 25 and 26
  misc_feature (0)...(0): Accession number cg43303165
ggcccccactatcaggggccctggctcaatcactgagaccatccaagtcc

SEQ ID NO: 1000 - DNA, 50 bp, Homo sapiens
  allele (26)...(0): single nucleotide polymorphism
  misc_feature (25)...(26): Nucleotide deleted between bases 25 and 26
  misc_feature (0)...(0): Accession number cg42489148
tgcgagtggatgcggaaccggcgcacagtccctcggcagccaagtgaaaa

SEQ ID NO: 1001 - DNA, 50 bp, Homo sapiens
  allele (26)...(0): single nucleotide polymorphism
  misc_feature (25)...(26): Nucleotide deleted between bases 25 and 26
  misc_feature (0)...(0): Accession number cg43929210
tctggctcagcatgatgttccctctgccttcagcctgccactaaagaatg

SEQ ID NO: 1002 - DNA, 50 bp, Homo sapiens
  allele (26)...(0): single nucleotide polymorphism
  misc_feature (25)...(26): Nucleotide deleted between bases 25 and 26
  misc_feature (0)...(0): Accession number cg44004587
gcttattttcggtgttgaataagaaacactaaaagctcgatgcaataatc

SEQ ID NO: 1003 - DNA, 50 bp, Homo sapiens
  allele (26)...(0): single nucleotide polymorphism
  misc_feature (25)...(26): Nucleotide deleted between bases 25 and 26
  misc_feature (0)...(0): Accession number cg41501665
cgcttctccaaggtgctggaggaggggcggccgccgaggagggcctgcgc

SEQ ID NO: 1004 - DNA, 50 bp, Homo sapiens
  allele (26)...(0): single nucleotide polymorphism
  misc_feature (25)...(26): Nucleotide deleted between bases 25 and 26
  misc_feature (0)...(0): Accession number cg41501665
cggccgccgaggagggcctgcgcgactgcagcgcagccggcggctctgcc

SEQ ID NO: 1005 - DNA, 50 bp, Homo sapiens
  allele (26)...(0): single nucleotide polymorphism
  misc_feature (25)...(26): Nucleotide deleted between bases 25 and 26
  misc_feature (0)...(0): Accession number cg41501665
tgcgcgagctgcagcgcagccggcgctctgccacgaggacgtggaggcgc

SEQ ID NO: 1006 - DNA, 50 bp, Homo sapiens
  allele (26)...(0): single nucleotide polymorphism
  misc_feature (25)...(26): Nucleotide deleted between bases 25 and 26
  misc_feature (0)...(0): Accession number cg41501665
gccacgaggacgtggaggcgctggcgccatctacgaggagaaggaggcct

SEQ ID NO: 1007 - DNA, 50 bp, Homo sapiens
  allele (26)...(0): single nucleotide polymorphism
  misc_feature (25)...(26): Nucleotide deleted between bases 25 and 26
  misc_feature (0)...(0): Accession number cg43939695
caagactgagatcaattgccggcggcggacgatgggaacctcttccccct

SEQ ID NO: 1008 - DNA, 50 bp, Homo sapiens
  allele (26)...(0): single nucleotide polymorphism
  misc_feature (25)...(26): Nucleotide deleted between bases 25 and 26
  misc_feature (0)...(0): Accession number cg29023997
tctggatgggatggagcaccatgtggcacctgcatccccaaagtggagct

SEQ ID NO: 1009 - DNA, 50 bp, Homo sapiens
  allele (26)...(0): single nucleotide polymorphism
  misc_feature (25)...(26): Nucleotide deleted between bases 25 and 26
  misc_feature (0)...(0): Accession number cg43983535
ctccaaacagcttcttcacttttttagaagggcttctgcagctaccaact

SEQ ID NO: 1010 - DNA, 50 bp, Homo sapiens
  allele (26)...(0): single nucleotide polymorphism
  misc_feature (25)...(26): Nucleotide deleted between bases 25 and 26
  misc_feature (0)...(0): Accession number cg42488873
ttccccttaaattggtcagcatagtccccattttggggcatccttcagct

SEQ ID NO: 1011 - DNA, 50 bp, Homo sapiens
  allele (26)...(0): single nucleotide polymorphism
  misc_feature (25)...(26): Nucleotide deleted between bases 25 and 26
  misc_feature (0)...(0): Accession number cg42488873
gtcagcatagtgccccattttggggatccttcagctggacaagggaaaca

SEQ ID NO: 1012 - DNA, 50 bp, Homo sapiens
  allele (26)...(0): single nucleotide polymorphism
  misc_feature (25)...(26): Nucleotide deleted between bases 25 and 26
  misc_feature (0)...(0): Accession number cg42488873
cacgcggccccccagcctcctgccccctccgcggccgtgtgcgcgcccag

SEQ ID NO: 1013 - DNA, 50 bp, Homo sapiens
  allele (26)...(0): single nucleotide polymorphism
  misc_feature (25)...(26): Nucleotide deleted between bases 25 and 26
  misc_feature (0)...(0): Accession number cg43249083
ggagcagctccaggagacgctgctggggctcttcgggctctggtgctgaa

SEQ ID NO: 1014 - DNA, 50 bp, Homo sapiens
  allele (26)...(0): single nucleotide polymorphism
  misc_feature (25)...(26): Nucleotide deleted between bases 25 and 26
  misc_feature (0)...(0): Accession number cg43991048
tctttcttttcttcttctttttttttgttttttctgctttatcctcttct

SEQ ID NO: 1015 - DNA, 50 bp, Homo sapiens
  allele (26)...(0): single nucleotide polymorphism
  misc_feature (25)...(26): Nucleotide deleted between bases 25 and 26
  misc_feature (0)...(0): Accession number cg43919677
gaagaaaagaaagaatgctactatatctcaatgacgccagtctctgtgat

SEQ ID NO: 1016 - DNA, 50 bp, Homo sapiens
  allele (26)...(0): single nucleotide polymorphism
  misc_feature (25)...(26): Nucleotide deleted between bases 25 and 26
  misc_feature (0)...(0): Accession number cg43997978
catcagctcactgtagattacctctcttcgtcaatgagggattccacgga

SEQ ID NO: 1017 - DNA, 50 bp, Homo sapiens
  allele (26)...(0): single nucleotide polymorphism
  misc_feature (25)...(26): Nucleotide deleted between bases 25 and 26
  misc_feature (0)...(0): Accession number cg43916615
atgacggaatataagctggtggtgggggcgccggcggtgtgggcaagagt

SEQ ID NO: 1018 - DNA, 50 bp, Homo sapiens
  allele (26)...(0): single nucleotide polymorphism
  misc_feature (25)...(26): Nucleotide deleted between bases 25 and 26
  misc_feature (0)...(0): Accession number cg43916615
tgacggaatataagctggtggtggtggcgccggcggtgtgggcaagagtg

SEQ ID NO: 1019 - DNA, 50 bp, Homo sapiens
  allele (26)...(0): single nucleotide polymorphism
  misc_feature (25)...(26): Nucleotide deleted between bases 25 and 26
  misc_feature (0)...(0): Accession number cg43916615
gacggaatataagctggtggtggtggcgccggcggtgtgggcaagagtgc

SEQ ID NO: 1020 - DNA, 50 bp, Homo sapiens
  allele (26)...(0): single nucleotide polymorphism
  misc_feature (25)...(26): Nucleotide deleted between bases 25 and 26
  misc_feature (0)...(0): Accession number cg43069905
agctccagcagtgacaggtcattctccccgcgtccgcgtcataccgcatg

SEQ ID NO: 1021 - DNA, 51 bp, Homo sapiens
  allele (26)...(0): single nucleotide polymorphism
  misc_feature (0)...(0): Accession number cg43069905
cagcagtgacaggtcattctccccccgcgtccgcgtcataccgcatgtgca

SEQ ID NO: 1022 - DNA, 50 bp, Homo sapiens
  allele (26)...(0): single nucleotide polymorphism
  misc_feature (25)...(26): Nucleotide deleted between bases 25 and 26
  misc_feature (0)...(0): Accession number cg44028327
atgcatacatcgatattcagctacgattgcttccttctcacagaactgtg

SEQ ID NO: 1023 - DNA, 50 bp, Homo sapiens
  allele (26)...(0): single nucleotide polymorphism
  misc_feature (25)...(26): Nucleotide deleted between bases 25 and 26
  misc_feature (0)...(0): Accession number cg43940280
cctcgaagtctgcctgggcacacacacatgcagattttggtgctttccca

SEQ ID NO: 1024 - DNA, 50 bp, Homo sapiens
  allele (26)...(0): single nucleotide polymorphism
  misc_feature (25)...(26): Nucleotide deleted between bases 25 and 26
  misc_feature (0)...(0): Accession number cg43974196
gattcagggcgtgtctggggtgaagccacagggttgagaaagcgaacctc

SEQ ID NO: 1025 - DNA, 50 bp, Homo sapiens
  allele (26)...(0): single nucleotide polymorphism
  misc_feature (25)...(26): Nucleotide deleted between bases 25 and 26
  misc_feature (0)...(0): Accession number cg43916919
gaagaagacgccctggttctcttgcccacaggcaccggcttcagcttctc

SEQ ID NO: 1026 - DNA, 50 bp, Homo sapiens
  allele (26)...(0): single nucleotide polymorphism
  misc_feature (25)...(26): Nucleotide deleted between bases 25 and 26
  misc_feature (0)...(0): Accession number cg21428405
atctcttcaggggcgaggttcgggtgcgcagcggaacgcggtcgagctcg

SEQ ID NO: 1027 - DNA, 50 bp, Homo sapiens
  allele (26)...(0): single nucleotide polymorphism
  misc_feature (25)...(26): Nucleotide deleted between bases 25 and 26
  misc_feature (0)...(0): Accession number cg43336100
atcatgctggagaactcgcagatgaagagcgcatgctgctgcaagccacg

SEQ ID NO: 1028 - DNA, 50 bp, Homo sapiens
  allele (26)...(0): single nucleotide polymorphism
  misc_feature (25)...(26): Nucleotide deleted between bases 25 and 26
  misc_feature (0)...(0): Accession number cg39517655
gggcgccttactcgctatgctgcaaggccccgggccttggcttcggccgc

SEQ ID NO: 1029 - DNA, 50 bp, Homo sapiens
  allele (26)...(0): single nucleotide polymorphism
  misc_feature (25)...(26): Nucleotide deleted between bases 25 and 26
  misc_feature (0)...(0): Accession number cg43954704
cccactggaagtggaggctccagtcaacccccctctgagctccgaggcag

SEQ ID NO: 1030 - DNA, 50 bp, Homo sapiens
  allele (26)...(0): single nucleotide polymorphism
  misc_feature (25)...(26): Nucleotide deleted between bases 25 and 26
  misc_feature (0)...(0): Accession number cg43986426
gcggacagtcgccctaagcagtgcaggtgtcttgagccctatggtggcca

SEQ ID NO: 1031 - DNA, 50 bp, Homo sapiens
  allele (26)...(0): single nucleotide polymorphism
  misc_feature (25)...(26): Nucleotide deleted between bases 25 and 26
  misc_feature (0)...(0): Accession number cg43917221
gaaatgtcatccacggtatttttttcagttttagtttgaccaaagcttta

SEQ ID NO: 1032 - DNA, 51 bp, Homo sapiens
  allele (26)...(0): single nucleotide polymorphism
  misc_feature (0)...(0): Accession number cg43918356
atgtcatcttcatctagaaacgcccatcacggaaatggaattgctgccaga

SEQ ID NO: 1033 - DNA, 50 bp, Homo sapiens
  allele (26)...(0): single nucleotide polymorphism
  misc_feature (25)...(26): Nucleotide deleted between bases 25 and 26
  misc_feature (0)...(0): Accession number cg43918446
ctttcccacatgacttgttacattcgaccactgggaccactcggtgagct

SEQ ID NO: 1034 - DNA, 50 bp, Homo sapiens
  allele (26)...(0): single nucleotide polymorphism
  misc_feature (25)...(26): Nucleotide deleted between bases 25 and 26
  misc_feature (0)...(0): Accession number cg43927750
taaaagttattctccaatggtgattggcaagccctgcctcctgtattctt

SEQ ID NO: 1035 - DNA, 50 bp, Homo sapiens
  allele (26)...(0): single nucleotide polymorphism
  misc_feature (25)...(26): Nucleotide deleted between bases 25 and 26
  misc_feature (0)...(0): Accession number cg43961075
gggtaggattgctcatttcagggcactgtcgcaagcatctcccaccccgt

SEQ ID NO: 1036 - DNA, 50 bp, Homo sapiens
  allele (26)...(0): single nucleotide polymorphism
  misc_feature (25)...(26): Nucleotide deleted between bases 25 and 26
  misc_feature (0)...(0): Accession number cg43961763
catctaggtcaacaggaaggtcaagtcccgctccggttccactgatccat

SEQ ID NO: 1037 - DNA, 50 bp, Homo sapiens
  allele (26)...(0): single nucleotide polymorphism
  misc_feature (25)...(26): Nucleotide deleted between bases 25 and 26
  misc_feature (0)...(0): Accession number cg43968223
gttctgttcttgtagcgctttctgcctgcagcatgatctgaagcttgttg

SEQ ID NO: 1038 - DNA, 50 bp, Homo sapiens
  allele (26)...(0): single nucleotide polymorphism
  misc_feature (25)...(26): Nucleotide deleted between bases 25 and 26
  misc_feature (0)...(0): Accession number cg43980727
ccctccaggtagaggcctaggaaggcccagaactgaagccgaagcgctgg

SEQ ID NO: 1039 - DNA, 50 bp, Homo sapiens
  allele (26)...(0): single nucleotide polymorphism
  misc_feature (25)...(26): Nucleotide deleted between bases 25 and 26
  misc_feature (0)...(0): Accession number cg43999667
ttctgttttgtcaggacttttttttctacaagttgtttttctgggatcac

SEQ ID NO: 1040 - DNA, 50 bp, Homo sapiens
  allele (26)...(0): single nucleotide polymorphism
  misc_feature (25)...(26): Nucleotide deleted between bases 25 and 26
  misc_feature (0)...(0): Accession number cg44022781
gtatcaaagtgctctttccaactttggaggccccatcaccactaccggta

SEQ ID NO: 1041 - DNA, 50 bp, Homo sapiens
  allele (26)...(0): single nucleotide polymorphism
  misc_feature (25)...(26): Nucleotide deleted between bases 25 and 26
  misc_feature (0)...(0): Accession number cg44919370
cgtggacttttccgaggatgacccctggaggccactgtccattgggcccc

SEQ ID NO: 1042 - DNA, 50 bp, Homo sapiens
  allele (26)...(0): single nucleotide polymorphism
  misc_feature (25)...(26): Nucleotide deleted between bases 25 and 26
  misc_feature (0)...(0): Accession number cg44932924
tctacaaccagagccaggaattacaacgaagctggaggactgcaggaaca

SEQ ID NO: 1043 - DNA, 50 bp, Homo sapiens
  allele (26)...(0): single nucleotide polymorphism
  misc_feature (25)...(26): Nucleotide deleted between bases 25 and 26
  misc_feature (0)...(0): Accession number cg43991434
ggggtgcaagggccttggggaaatatcctgctgcaccatgtggttcagcg

SEQ ID NO: 1044 - DNA, 50 bp, Homo sapiens
  allele (26)...(0): single nucleotide polymorphism
  misc_feature (25)...(26): Nucleotide deleted between bases 25 and 26
  misc_feature (0)...(0): Accession number cg44931278
cctcctccagggaagcactggccagtcctgcagtgtaggccacttctgca

SEQ ID NO: 1045 - DNA, 50 bp, Homo sapiens
  allele (26)...(0): single nucleotide polymorphism
  misc_feature (25)...(26): Nucleotide deleted between bases 25 and 26
  misc_feature (0)...(0): Accession number cg43949042
cacagctgcgttgccatagttgcccggaaaaagcggcccacgaaccaggc

SEQ ID NO: 1046 - DNA, 50 bp, Homo sapiens
  allele (26)...(0): single nucleotide polymorphism
  misc_feature (25)...(26): Nucleotide deleted between bases 25 and 26
  misc_feature (0)...(0): Accession number cg43972066
taaatttgacttttctcatgtaaaatgtctaatgcgatgtatttggtaat

SEQ ID NO: 1047 - DNA, 50 bp, Homo sapiens
  allele (26)...(0): single nucleotide polymorphism
  misc_feature (25)...(26): Nucleotide deleted between bases 25 and 26
  misc_feature (0)...(0): Accession number cg43955639
gggggtactggggacctcgtctgttggttcccctcctccagggtagcggc

SEQ ID NO: 1048 - DNA, 50 bp, Homo sapiens
  allele (26)...(0): single nucleotide polymorphism
  misc_feature (25)...(26): Nucleotide deleted between bases 25 and 26
  misc_feature (0)...(0): Accession number cg43955639
gggtactggggacctcgtctgttggttcccctcctccagggtagcggctc

SEQ ID NO: 1049 - DNA, 50 bp, Homo sapiens
  allele (26)...(0): single nucleotide polymorphism
  misc_feature (25)...(26): Nucleotide deleted between bases 25 and 26
  misc_feature (0)...(0): Accession number cg43965656
ctgcctattctgaaccagccaacattgagattgttgccaatgcccgaggt

SEQ ID NO: 1050 - DNA, 50 bp, Homo sapiens
  allele (26)...(0): single nucleotide polymorphism
  misc_feature (25)...(26): Nucleotide deleted between bases 25 and 26
  misc_feature (0)...(0): Accession number cg43944615
tacatggcacagaggaagaagcgcacacggcgctgcagttcacgtccacc

SEQ ID NO: 1051 - DNA, 50 bp, Homo sapiens
  allele (26)...(0): single nucleotide polymorphism
  misc_feature (25)...(26): Nucleotide deleted between bases 25 and 26
  misc_feature (0)...(0): Accession number cg43323906
ctctggtgctgctcctctgaagattaagcttatttcaatgagactgcaga

SEQ ID NO: 1052 - DNA, 50 bp, Homo sapiens
  allele (26)...(0): single nucleotide polymorphism
  misc_feature (25)...(26): Nucleotide deleted between bases 25 and 26
  misc_feature (0)...(0): Accession number cg44004690
gaggaggaggaggtggaggaggagggggagaagaggatgttttcaccgag

SEQ ID NO: 1053 - DNA, 50 bp, Homo sapiens
  allele (26)...(0): single nucleotide polymorphism
  misc_feature (25)...(26): Nucleotide deleted between bases 25 and 26
  misc_feature (0)...(0): Accession number cg44004690
accggagagtgggcaccccgtcccagggccatttcttcgagggagcacca

SEQ ID NO: 1054 - DNA, 50 bp, Homo sapiens
  allele (26)...(0): single nucleotide polymorphism
  misc_feature (25)...(26): Nucleotide deleted between bases 25 and 26
  misc_feature (0)...(0): Accession number cg43957283
tcgagggtgaccacagccccagaggccgcagcacagcgcagggggtggcg

SEQ ID NO: 1055 - DNA, 50 bp, Homo sapiens
  allele (26)...(0): single nucleotide polymorphism
  misc_feature (25)...(26): Nucleotide deleted between bases 25 and 26
  misc_feature (0)...(0): Accession number cg43329741
gctctacctgggctacaccccgcagcggcccgtgaagtgcgcatcatgca

SEQ ID NO: 1056 - DNA, 51 bp, Homo sapiens
  allele (26)...(0): single nucleotide polymorphism
  misc_feature (0)...(0): Accession number cg44010310
tttgttgagatgcatgaattttttttctctattgctgcttgaaaatttaca

SEQ ID NO: 1057 - DNA, 51 bp, Homo sapiens
  allele (26)...(0): single nucleotide polymorphism
  misc_feature (0)...(0): Accession number cg39729127
gctctcttctttattggtaaccagttggtggccacgagtcatacagggaaa

SEQ ID NO: 1058 - DNA, 50 bp, Homo sapiens
  allele (26)...(0): single nucleotide polymorphism
  misc_feature (25)...(26): Nucleotide deleted between bases 25 and 26
  misc_feature (0)...(0): Accession number cg43135797
agatctgtctccccggagacccggaccgctggccattgcagaaggcgccc

SEQ ID NO: 1059 - DNA, 50 bp, Homo sapiens
  allele (26)...(0): single nucleotide polymorphism
  misc_feature (25)...(26): Nucleotide deleted between bases 25 and 26
  misc_feature (0)...(0): Accession number cg43965796
atcactgttgatgctctgggccacgcagggtactggatcttcatggccac

SEQ ID NO: 1060 - DNA, 50 bp, Homo sapiens
  allele (26)...(0): single nucleotide polymorphism
  misc_feature (25)...(26): Nucleotide deleted between bases 25 and 26
  misc_feature (0)...(0): Accession number cg43965796
tcactgttgatgctctgggccacgcagggtactggatcttcatggccacc

SEQ ID NO: 1061 - DNA, 50 bp, Homo sapiens
  allele (26)...(0): single nucleotide polymorphism
  misc_feature (25)...(26): Nucleotide deleted between bases 25 and 26
  misc_feature (0)...(0): Accession number cg42907867
agggccacggggtgggccagggggcgggccatttccagtggctccttgtc

SEQ ID NO: 1062 - DNA, 50 bp, Homo sapiens
  allele (26)...(0): single nucleotide polymorphism
  misc_feature (25)...(26): Nucleotide deleted between bases 25 and 26
  misc_feature (0)...(0): Accession number cg43922710
tctacccagctaaatacacattatgcatttagcaaactaacttacaagtc

SEQ ID NO: 1063 - DNA, 50 bp, Homo sapiens
  allele (26)...(0): single nucleotide polymorphism
  misc_feature (25)...(26): Nucleotide deleted between bases 25 and 26
  misc_feature (0)...(0): Accession number cg43303845
gcaggaacgcctggatcgggagaggaagaaagacaagaacgagagaggct

SEQ ID NO: 1064 - DNA, 50 bp, Homo sapiens
  allele (26)...(0): single nucleotide polymorphism
  misc_feature (25)...(26): Nucleotide deleted between bases 25 and 26
  misc_feature (0)...(0): Accession number cg43973762
ataacagaaagcaagagaagtgtgaaactctgaaagaagaagttcaaaag

SEQ ID NO: 1065 - DNA, 50 bp, Homo sapiens
  allele (26)...(0): single nucleotide polymorphism
  misc_feature (25)...(26): Nucleotide deleted between bases 25 and 26
  misc_feature (0)...(0): Accession number cg43918679
tcacagatatctccatttgccaggaatgcccagcctggaggtgatcacgc

SEQ ID NO: 1066 - DNA, 50 bp, Homo sapiens
  allele (26)...(0): single nucleotide polymorphism
  misc_feature (25)...(26): Nucleotide deleted between bases 25 and 26
  misc_feature (0)...(0): Accession number cg38059286
gccgctccctcttctcactgaagcaatcttccaggaggacaaagacctgg

SEQ ID NO: 1067 - DNA, 50 bp, Homo sapiens
  allele (26)...(0): single nucleotide polymorphism
  misc_feature (25)...(26): Nucleotide deleted between bases 25 and 26
  misc_feature (0)...(0): Accession number cg42549778
actgtcacttccctgctgcagggcacccccacctgtgagtggctcgagcc

SEQ ID NO: 1068 - DNA, 50 bp, Homo sapiens
  allele (26)...(0): single nucleotide polymorphism
  misc_feature (25)...(26): Nucleotide deleted between bases 25 and 26
  misc_feature (0)...(0): Accession number cg44921277
ccctgatcatcctcatcgtggagcttgcgggctccaggcccgcttccccc

SEQ ID NO: 1069 - DNA, 50 bp, Homo sapiens
  allele (26)...(0): single nucleotide polymorphism
  misc_feature (25)...(26): Nucleotide deleted between bases 25 and 26
  misc_feature (0)...(0): Accession number cg44921277
ctgatcatcctcatcgtggagctgtcgggctccaggcccgcttccccctg

SEQ ID NO: 1070 - DNA, 51 bp, Homo sapiens
  allele (26)...(0): single nucleotide polymorphism
  misc_feature (0)...(0): Accession number cg42530218
gatttaatacacagcagcagcagcagaactacattaggtggtctcttcagt

SEQ ID NO: 1071 - DNA, 50 bp, Homo sapiens
  allele (26)...(0): single nucleotide polymorphism
  misc_feature (25)...(26): Nucleotide deleted between bases 25 and 26
  misc_feature (0)...(0): Accession number cg42530218
atttaatacacagcagcagcagcaactacattaggtggtctcttcagtca

SEQ ID NO: 1072 - DNA, 50 bp, Homo sapiens
  allele (26)...(0): single nucleotide polymorphism
  misc_feature (25)...(26): Nucleotide deleted between bases 25 and 26
  misc_feature (0)...(0): Accession number cg43325007
aggatacccccgaggaaggccgccagaatgcgtgtgctgggtaggtcttg

SEQ ID NO: 1073 - DNA, 50 bp, Homo sapiens
  allele (26)...(0): single nucleotide polymorphism
  misc_feature (25)...(26): Nucleotide deleted between bases 25 and 26
  misc_feature (0)...(0): Accession number cg43981269
ggcctacggcgcctacgctcaggcatgatgcagcagcaagcggccctgat

SEQ ID NO: 1074 - DNA, 50 bp, Homo sapiens
  allele (26)...(0): single nucleotide polymorphism
  misc_feature (25)...(26): Nucleotide deleted between bases 25 and 26
  misc_feature (0)...(0): Accession number cg43250166
aggtggccctcacacccagtgctgtctgcgcggagggctgtactgaaggt

SEQ ID NO: 1075 - DNA, 51 bp, Homo sapiens
  allele (26)...(0): single nucleotide polymorphism
  misc_feature (0)...(0): Accession number cg43982164
ctgcggcgggtgctcatcctggacacattcacctgcctcctatgtcttcca

SEQ ID NO: 1076 - DNA, 50 bp, Homo sapiens
  allele (26)...(0): single nucleotide polymorphism
  misc_feature (25)...(26): Nucleotide deleted between bases 25 and 26
  misc_feature (0)...(0): Accession number cg43980889
ttaaatatagacaagtggaccatttgcctcaaattcacaggagccagcat

SEQ ID NO: 1077 - DNA, 50 bp, Homo sapiens
  allele (26)...(0): single nucleotide polymorphism
  misc_feature (25)...(26): Nucleotide deleted between bases 25 and 26
  misc_feature (0)...(0): Accession number cg43970119
gtggccattggtgagacatccatcatattgcaaaccaaaagttttatttc

SEQ ID NO: 1078 - DNA, 50 bp, Homo sapiens
  allele (26)...(0): single nucleotide polymorphism
  misc_feature (25)...(26): Nucleotide deleted between bases 25 and 26
  misc_feature (0)...(0): Accession number cg44030987
tcggcatgttgagtggaacagttgttttacttgaattccaatctccttct

SEQ ID NO: 1079 - DNA, 50 bp, Homo sapiens
  allele (26)...(0): single nucleotide polymorphism
  misc_feature (25)...(26): Nucleotide deleted between bases 25 and 26
  misc_feature (0)...(0): Accession number cg43320682
ggtggctcaggggctgggggaggctccctggggcttcagacagcacatag

SEQ ID NO: 1080 - DNA, 50 bp, Homo sapiens
  allele (26)...(0): single nucleotide polymorphism
  misc_feature (25)...(26): Nucleotide deleted between bases 25 and 26
  misc_feature (0)...(0): Accession number cg25255686
aaggcaccatcaagtcggcggtggcttcgggcatctccttgccgagggta

SEQ ID NO: 1081 - DNA, 50 bp, Homo sapiens
  allele (26)...(0): single nucleotide polymorphism
  misc_feature (25)...(26): Nucleotide deleted between bases 25 and 26
  misc_feature (0)...(0): Accession number cg43988975
ctcctcctgaccgagtgggccggcagagcttgaaatcgtcattggagatg

SEQ ID NO: 1082 - DNA, 50 bp, Homo sapiens
  allele (26)...(0): single nucleotide polymorphism
  misc_feature (25)...(26): Nucleotide deleted between bases 25 and 26
  misc_feature (0)...(0): Accession number cg39523553
cactggtatgcacggcgcggtctcccagtgtgaggtctgcccgatccggg

SEQ ID NO: 1083 - DNA, 51 bp, Homo sapiens
  allele (26)...(0): single nucleotide polymorphism
  misc_feature (0)...(0): Accession number cg43951096
ctccctcctgggtatctgcatcttcaaaaatctccttcttggttttcatcc

SEQ ID NO: 1084 - DNA, 50 bp, Homo sapiens
  allele (26)...(0): single nucleotide polymorphism
  misc_feature (25)...(26): Nucleotide deleted between bases 25 and 26
  misc_feature (0)...(0): Accession number cg42831353
ggacacaggctgcggtgtaagcccggtcaccgccggcacctgcaggaact

SEQ ID NO: 1085 - DNA, 50 bp, Homo sapiens
  allele (26)...(0): single nucleotide polymorphism
  misc_feature (25)...(26): Nucleotide deleted between bases 25 and 26
  misc_feature (0)...(0): Accession number cg44938009
aatactccgtgcagcgagtgcgtcactccgtgaagaatttgatcaaggtc

SEQ ID NO: 1086 - DNA, 50 bp, Homo sapiens
  allele (26)...(0): single nucleotide polymorphism
  misc_feature (25)...(26): Nucleotide deleted between bases 25 and 26
  misc_feature (0)...(0): Accession number cg43054992
caaaatcacagctgaagaaatgtatatatatttgggaaatatggacctat

SEQ ID NO: 1087 - DNA, 50 bp, Homo sapiens
  allele (26)...(0): single nucleotide polymorphism
  misc_feature (25)...(26): Nucleotide deleted between bases 25 and 26
  misc_feature (0)...(0): Accession number cg39516123
cctggggctcaccaaggcaacctggctccggtcttcatagcaatgcaata

SEQ ID NO: 1088 - DNA, 50 bp, Homo sapiens
  allele (26)...(0): single nucleotide polymorphism
  misc_feature (25)...(26): Nucleotide deleted between bases 25 and 26
  misc_feature (0)...(0): Accession number cg43983590
ggaggagccaggcgagcacaccccctgttggcccctgccacggcccagcc

SEQ ID NO: 1089 - DNA, 50 bp, Homo sapiens
  allele (26)...(0): single nucleotide polymorphism
  misc_feature (25)...(26): Nucleotide deleted between bases 25 and 26
  misc_feature (0)...(0): Accession number cg44128084
cggcggcgcatgctcgacgttctgggtctgtcgacgagttgccggtgcaa

SEQ ID NO: 1090 - DNA, 50 bp, Homo sapiens
  allele (26)...(0): single nucleotide polymorphism
  misc_feature (25)...(26): Nucleotide deleted between bases 25 and 26
  misc_feature (0)...(0): Accession number cg44128084
cgtctgtcgacgagttgccggtgcacgctggagctgcgacgggatcctgg

SEQ ID NO: 1091 - DNA, 50 bp, Homo sapiens
  allele (26)...(0): single nucleotide polymorphism
  misc_feature (25)...(26): Nucleotide deleted between bases 25 and 26
  misc_feature (0)...(0): Accession number cg43976473
ggccctgtgcttggagccgtgggctcgtagcccgagtgataagccatggc

SEQ ID NO: 1092 - DNA, 50 bp, Homo sapiens
  allele (26)...(0): single nucleotide polymorphism
  misc_feature (25)...(26): Nucleotide deleted between bases 25 and 26
  misc_feature (0)...(0): Accession number cg40309770
ttccggccgccgcgtccagggctcgccgctgaggtcgttcatgaccccgc

SEQ ID NO: 1093 - DNA, 50 bp, Homo sapiens
  allele (26)...(0): single nucleotide polymorphism
  misc_feature (25)...(26): Nucleotide deleted between bases 25 and 26
  misc_feature (0)...(0): Accession number cg42725664
agatagctgagaatattctgcgcaacctcacagcttgtttcctggcagcc

SEQ ID NO: 1094 - DNA, 50 bp, Homo sapiens
  allele (26)...(0): single nucleotide polymorphism
  misc_feature (25)...(26): Nucleotide deleted between bases 25 and 26
  misc_feature (0)...(0): Accession number cg39380052
atgagatcgacgccttgcgcggccgggcgtagacattccgcacccgctca

SEQ ID NO: 1095 - DNA, 50 bp, Homo sapiens
  allele (26)...(0): single nucleotide polymorphism
  misc_feature (25)...(26): Nucleotide deleted between bases 25 and 26
  misc_feature (0)...(0): Accession number cg44928804
ctctcaatcatgccgctttagagaagcaacatgggcaacctgatttgtga

SEQ ID NO: 1096 - protein, 14 aa, Homo sapiens
  VARIANT (7)...(0): cSNP translation
DLLKEKVSIYQNQN

SEQ ID NO: 1097 - protein, 14 aa, Homo sapiens
  VARIANT (7)...(0): cSNP translation
EIPSKERPYDAAKD

SEQ ID NO: 1098 - protein, 14 aa, Homo sapiens
  VARIANT (7)...(0): cSNP translation
AAPAASVPRPATLP

SEQ ID NO: 1099 - protein, 14 aa, Homo sapiens
  VARIANT (7)...(0): cSNP translation
FWGQFGVKTLKYRS

SEQ ID NO: 1100 - protein, 14 aa, Homo sapiens
  VARIANT (7)...(0): cSNP translation
CEKITCHKPDVSHG

SEQ ID NO: 1101 - protein, 14 aa, Homo sapiens
  VARIANT (7)...(0): cSNP translation
PPRSEEAAVLKQKL

SEQ ID NO: 1102 - protein, 14 aa, Homo sapiens
  VARIANT (7)...(0): cSNP translation
RGLASAVKGGHGGA

SEQ ID NO: 1103 - protein, 14 aa, Homo sapiens
  VARIANT (7)...(0): cSNP translation
KKDDVTAGKKPFRP

SEQ ID NO: 1104 - protein, 14 aa, Homo sapiens
  VARIANT (7)...(0): cSNP translation
NFFKLNDKSEKDKK

SEQ ID NO: 1105 - protein, 14 aa, Homo sapiens
  VARIANT (7)...(0): cSNP translation
HKEDAGAVCSEHQS

SEQ ID NO: 1106 - protein, 14 aa, Homo sapiens
  VARIANT (7)...(0): cSNP translation
LKKARTGLQMDELK

SEQ ID NO: 1107 - protein, 14 aa, Homo sapiens
  VARIANT (7)...(0): cSNP translation
KLNLKMKEEYDKIQ

SEQ ID NO: 1108 - protein, 14 aa, Homo sapiens
  VARIANT (7)...(0): cSNP translation
LMSVKMAKKYKNIV

SEQ ID NO: 1109 - protein, 14 aa, Homo sapiens
  VARIANT (7)...(0): cSNP translation
CDPEVNNFRAKMCQ

SEQ ID NO: 1110 - protein, 14 aa, Homo sapiens
  VARIANT (7)...(0): cSNP translation
EFGGGHVKDEVFGT

SEQ ID NO: 1111 - protein, 14 aa, Homo sapiens
  VARIANT (7)...(0): cSNP translation
CSSRSDVPGSDKDT

SEQ ID NO: 1112 - protein, 14 aa, Homo sapiens
  VARIANT (7)...(0): cSNP translation
GGMTTKIEAARMAT

SEQ ID NO: 1113 - protein, 14 aa, Homo sapiens
  VARIANT (7)...(0): cSNP translation
LRGANPNLKDRTGF

SEQ ID NO: 1114 - protein, 14 aa, Homo sapiens
  VARIANT (7)...(0): cSNP translation
NLHTLNNYQKLLGN

SEQ ID NO: 1115 - protein, 14 aa, Homo sapiens
  VARIANT (7)...(0): cSNP translation
LKEMKEVLGTPGAA

SEQ ID NO: 1116 - protein, 14 aa, Homo sapiens
  VARIANT (7)...(0): cSNP translation
PGGCSAISAHGCLF

SEQ ID NO: 1117 - protein, 14 aa, Homo sapiens
  VARIANT (7)...(0): cSNP translation
GEEYFYIATQGPLL

SEQ ID NO: 1118 - protein, 14 aa, Homo sapiens
  VARIANT (7)...(0): cSNP translation
PIGGRNIQGGIRFG

SEQ ID NO: 1119 - protein, 14 aa, Homo sapiens
  VARIANT (7)...(0): cSNP translation
KNKMEIHEDPKFLI

SEQ ID NO: 1120 - protein, 14 aa, Homo sapiens
  VARIANT (7)...(0): cSNP translation
AQENQGIFFSGDSY

SEQ ID NO: 1121 - protein, 14 aa, Homo sapiens
  VARIANT (7)...(0): cSNP translation
KYDMEVKVQKTSKE

SEQ ID NO: 1122 - protein, 14 aa, Homo sapiens
  VARIANT (7)...(0): cSNP translation
SRGFTYRLHFWLGK

SEQ ID NO: 1123 - protein, 14 aa, Homo sapiens
  VARIANT (7)...(0): cSNP translation
MNQLSHINLIQLYD

SEQ ID NO: 1124 - protein, 14 aa, Homo sapiens
  VARIANT (7)...(0): cSNP translation
LTELDVILFTRQIC

SEQ ID NO: 1125 - protein, 14 aa, Homo sapiens
  VARIANT (7)...(0): cSNP translation
EYAKYCTEILGVAA

SEQ ID NO: 1126 - protein, 14 aa, Homo sapiens
  VARIANT (7)...(0): cSNP translation
NVGPQMVISTPQRL

SEQ ID NO: 1127 - protein, 14 aa, Homo sapiens
  VARIANT (7)...(0): cSNP translation
AAHMAASAILNLST

SEQ ID NO: 1128 - protein, 14 aa, Homo sapiens
  VARIANT (7)...(0): cSNP translation
FHGKFINTGFSLPF

SEQ ID NO: 1129 - protein, 14 aa, Homo sapiens
  VARIANT (7)...(0): cSNP translation
KPSAAERPSHGEGP

SEQ ID NO: 1130 - protein, 14 aa, Homo sapiens
  VARIANT (7)...(0): cSNP translation
ELQEHLNTYNVKRE

SEQ ID NO: 1131 - protein, 14 aa, Homo sapiens
  VARIANT (7)...(0): cSNP translation
NSISVRVFLDEDDM

SEQ ID NO: 1132 - protein, 14 aa, Homo sapiens
  VARIANT (7)...(0): cSNP translation
QENEDNRQHKESLK

SEQ ID NO: 1133 - protein, 14 aa, Homo sapiens
  VARIANT (7)...(0): cSNP translation
SAKKPSSGSRYQPL

SEQ ID NO: 1134 - protein, 14 aa, Homo sapiens
  VARIANT (7)...(0): cSNP translation
DGWLEGARLSDGER

SEQ ID NO: 1135 - protein, 14 aa, Homo sapiens
  VARIANT (7)...(0): cSNP translation
GKNSSYAHGGLDSN

SEQ ID NO: 1136 - protein, 14 aa, Homo sapiens
  VARIANT (7)...(0): cSNP translation
SNESLVANRVTGNF

SEQ ID NO: 1137 - protein, 14 aa, Homo sapiens
  VARIANT (7)...(0): cSNP translation
SYSQAGVTETEWTS

SEQ ID NO: 1138 - protein, 14 aa, Homo sapiens
  VARIANT (7)...(0): cSNP translation
EPKSLLTLGSYPPA

SEQ ID NO: 1139 - protein, 14 aa, Homo sapiens
  VARIANT (7)...(0): cSNP translation
FWIVFSVIHIIATL

SEQ ID NO: 1140 - protein, 14 aa, Homo sapiens
  VARIANT (7)...(0): cSNP translation
YVDPDRIKRAQSYA

SEQ ID NO: 1141 - protein, 14 aa, Homo sapiens
  VARIANT (7)...(0): cSNP translation
ERLERLERERQERE

SEQ ID NO: 1142 - protein, 14 aa, Homo sapiens
  VARIANT (7)...(0): cSNP translation
RDKEREHQRDWEDK

SEQ ID NO: 1143 - protein, 14 aa, Homo sapiens
  VARIANT (7)...(0): cSNP translation
YSSSGPDLRRSLFS

SEQ ID NO: 1144 - protein, 14 aa, Homo sapiens
  VARIANT (7)...(0): cSNP translation
QPAPSPDDLALSMG

SEQ ID NO: 1145 - protein, 14 aa, Homo sapiens
  VARIANT (7)...(0): cSNP translation
FDFQVGEEAPILPD

SEQ ID NO: 1146 - protein, 14 aa, Homo sapiens
  VARIANT (7)...(0): cSNP translation
LQEKLWVILQATYI

SEQ ID NO: 1147 - protein, 14 aa, Homo sapiens
  VARIANT (7)...(0): cSNP translation
CGKSVYVAEKVMGG

SEQ ID NO: 1148 - protein, 14 aa, Homo sapiens
  VARIANT (7)...(0): cSNP translation
KSKSNSTAAREPNG

SEQ ID NO: 1149 - protein, 14 aa, Homo sapiens
  VARIANT (7)...(0): cSNP translation
LSPGGEFQKWNGTA

SEQ ID NO: 1150 - protein, 14 aa, Homo sapiens
  VARIANT (7)...(0): cSNP translation
QLQLQAVHAQEQIC

SEQ ID NO: 1151 - protein, 14 aa, Homo sapiens
  VARIANT (7)...(0): cSNP translation
LLTDGDLHIRDDGR

SEQ ID NO: 1152 - protein, 14 aa, Homo sapiens
  VARIANT (7)...(0): cSNP translation
GKRLFVIKPSLYYD

SEQ ID NO: 1153 - protein, 14 aa, Homo sapiens
  VARIANT (7)...(0): cSNP translation
LVPDEDVRAAKWAV

SEQ ID NO: 1154 - protein, 14 aa, Homo sapiens
  VARIANT (7)...(0): cSNP translation
VVRNSPRGVKVQMA

SEQ ID NO: 1155 - protein, 14 aa, Homo sapiens
  VARIANT (7)...(0): cSNP translation
ALSAWPQLDQASRC

SEQ ID NO: 1156 - protein, 14 aa, Homo sapiens
  VARIANT (7)...(0): cSNP translation
IWSFCFYVVTVFSV

SEQ ID NO: 1157 - protein, 14 aa, Homo sapiens
  VARIANT (7)...(0): cSNP translation
NLSNFLNKSGLQGY

SEQ ID NO: 1158 - protein, 14 aa, Homo sapiens
  VARIANT (7)...(0): cSNP translation
TSSSKNRDPITIVD

SEQ ID NO: 1159 - protein, 14 aa, Homo sapiens
  VARIANT (7)...(0): cSNP translation
RLHNEVDRKLGKPD

SEQ ID NO: 1160 - protein, 14 aa, Homo sapiens
  VARIANT (7)...(0): cSNP translation
MLLPSWRTSSYVGA

SEQ ID NO: 1161 - protein, 14 aa, Homo sapiens
  VARIANT (7)...(0): cSNP translation
GLLGTLIAMLLPSW

SEQ ID NO: 1162 - protein, 14 aa, Homo sapiens
  VARIANT (7)...(0): cSNP translation
VKTPETIVPTAPEL

SEQ ID NO: 1163 - protein, 14 aa, Homo sapiens
  VARIANT (7)...(0): cSNP translation
QPSTSTNQPVTSEP

SEQ ID NO: 1164 - protein, 14 aa, Homo sapiens
  VARIANT (7)...(0): cSNP translation
NVVRAMVDNWDVLF

SEQ ID NO: 1165 - protein, 14 aa, Homo sapiens
  VARIANT (7)...(0): cSNP translation
QARHRTGGTNTPPS

SEQ ID NO: 1166 - protein, 14 aa, Homo sapiens
  VARIANT (7)...(0): cSNP translation
FKNIKSATELNGDI

SEQ ID NO: 1167 - protein, 14 aa, Homo sapiens
  VARIANT (7)...(0): cSNP translation
ELAINPVGDRIINA

SEQ ID NO: 1168 - protein, 14 aa, Homo sapiens
  VARIANT (7)...(0): cSNP translation
NGTLSRDDFQRIPE

SEQ ID NO: 1169 - protein, 14 aa, Homo sapiens
  VARIANT (7)...(0): cSNP translation
KHMEMEDISSEEVV

SEQ ID NO: 1170 - protein, 14 aa, Homo sapiens
  VARIANT (7)...(0): cSNP translation
ISPLTPISVSPANR

SEQ ID NO: 1171 - protein, 14 aa, Homo sapiens
  VARIANT (7)...(0): cSNP translation
CPPDYHYIHTEISR

SEQ ID NO: 1172 - protein, 6 aa, Homo sapiens
  VARIANT (7)...(0): cSNP translation
RHTDLD

SEQ ID NO: 1173 - protein, 5 aa, Homo sapiens
SFLVR

SEQ ID NO: 1174 - protein, 14 aa, Homo sapiens
  VARIANT (7)...(0): cSNP translation
GIPGGPGGPGCQEL

SEQ ID NO: 1175 - protein, 14 aa, Homo sapiens
  VARIANT (7)...(0): cSNP translation
KYHGVSPLNPPETL

SEQ ID NO: 1176 - protein, 14 aa, Homo sapiens
  VARIANT (7)...(0): cSNP translation
ERVVGRHRSPCMQD

SEQ ID NO: 1177 - protein, 14 aa, Homo sapiens
  VARIANT (7)...(0): cSNP translation
TVYPPLLSIQAHSG

SEQ ID NO: 1178 - protein, 14 aa, Homo sapiens
  VARIANT (7)...(0): cSNP translation
LALPSVTLCTFNSY

SEQ ID NO: 1179 - protein, 14 aa, Homo sapiens
  VARIANT (7)...(0): cSNP translation
PNVYHEPKLAAKEY

SEQ ID NO: 1180 - protein, 14 aa, Homo sapiens
  VARIANT (7)...(0): cSNP translation
NLQSKTAGLHVTEY

SEQ ID NO: 1181 - protein, 14 aa, Homo sapiens
  VARIANT (7)...(0): cSNP translation
SSIIADQIALKLVG

SEQ ID NO: 1182 - protein, 14 aa, Homo sapiens
  VARIANT (7)...(0): cSNP translation
AGGIRHTPDEIFLL

SEQ ID NO: 1183 - protein, 14 aa, Homo sapiens
  VARIANT (7)...(0): cSNP translation
LDIATDHVQKRKQF

SEQ ID NO: 1184 - protein, 14 aa, Homo sapiens
  VARIANT (7)...(0): cSNP translation
PKSGDWFCPNPSCG

SEQ ID NO: 1185 - protein, 14 aa, Homo sapiens
  VARIANT (7)...(0): cSNP translation
AVPGALCPLTITSS

SEQ ID NO: 1186 - protein, 14 aa, Homo sapiens
  VARIANT (7)...(0): cSNP translation
INKQVEPYREESQK

SEQ ID NO: 1187 - protein, 14 aa, Homo sapiens
  VARIANT (7)...(0): cSNP translation
REESQKCLKEFQEN

SEQ ID NO: 1188 - protein, 14 aa, Homo sapiens
  VARIANT (7)...(0): cSNP translation
EDFKKDVKNSLRET

SEQ ID NO: 1189 - protein, 14 aa, Homo sapiens
  VARIANT (7)...(0): cSNP translation
MKNSLRGTQENINK

SEQ ID NO: 1190 - protein, 14 aa, Homo sapiens
  VARIANT (7)...(0): cSNP translation
ETQENISKQVEAYR

SEQ ID NO: 1191 - protein, 14 aa, Homo sapiens
  VARIANT (7)...(0): cSNP translation
TQENINEQVEAYRE

SEQ ID NO: 1192 - protein, 6 aa, Homo sapiens
  VARIANT (7)...(0): cSNP translation
IVTATE

SEQ ID NO: 1193 - protein, 14 aa, Homo sapiens
  VARIANT (7)...(0): cSNP translation
MGGGRDPEEMEIDG

SEQ ID NO: 1194 - protein, 14 aa, Homo sapiens
  VARIANT (7)...(0): cSNP translation
EVKRKQCDAYGSAG

SEQ ID NO: 1195 - protein, 14 aa, Homo sapiens
  VARIANT (7)...(0): cSNP translation
NYRNNPSHNFRHCF

SEQ ID NO: 1196 - protein, 14 aa, Homo sapiens
  VARIANT (7)...(0): cSNP translation
LLRHHGGTVLPSLD

SEQ ID NO: 1197 - protein, 14 aa, Homo sapiens
  VARIANT (7)...(0): cSNP translation
LSTYSLDWVMAAVV

SEQ ID NO: 1198 - protein, 14 aa, Homo sapiens
  VARIANT (7)...(0): cSNP translation
IICCSELPVVKTEM

SEQ ID NO: 1199 - protein, 14 aa, Homo sapiens
  VARIANT (7)...(0): cSNP translation
ENGDFASFRVERAE

SEQ ID NO: 1200 - protein, 14 aa, Homo sapiens
  VARIANT (7)...(0): cSNP translation
CKQTAGQGSPCEEQ

SEQ ID NO: 1201 - protein, 14 aa, Homo sapiens
  VARIANT (7)...(0): cSNP translation
NKEKTEFGTHPKGT

SEQ ID NO: 1202 - protein, 14 aa, Homo sapiens
  VARIANT (7)...(0): cSNP translation
LLPFKSPSGNDVEA

SEQ ID NO: 1203 - protein, 14 aa, Homo sapiens
  VARIANT (7)...(0): cSNP translation
LMEEKFPGDAGLGK

SEQ ID NO: 1204 - protein, 14 aa, Homo sapiens
  VARIANT (7)...(0): cSNP translation
NDLKLNSKMREEYD

SEQ ID NO: 1205 - protein, 14 aa, Homo sapiens
  VARIANT (7)...(0): cSNP translation
MGKKYKKIVLLKGL

SEQ ID NO: 1206 - protein, 14 aa, Homo sapiens
  VARIANT (7)...(0): cSNP translation
SVKMGKNYKNIVLL

SEQ ID NO: 1207 - protein, 14 aa, Homo sapiens
  VARIANT (7)...(0): cSNP translation
LWKTQKLSLWEAPR

SEQ ID NO: 1208 - protein, 14 aa, Homo sapiens
  VARIANT (7)...(0): cSNP translation
DLIWTLLQDCREIF

SEQ ID NO: 1209 - protein, 14 aa, Homo sapiens
  VARIANT (7)...(0): cSNP translation
AWLPPTPAEHDHSL

SEQ ID NO: 1210 - protein, 14 aa, Homo sapiens
  VARIANT (7)...(0): cSNP translation
DFGLSKIGLMSLTT

SEQ ID NO: 1211 - protein, 14 aa, Homo sapiens
  VARIANT (7)...(0): cSNP translation
GNSRVWRGTMEKAG

SEQ ID NO: 1212 - protein, 14 aa, Homo sapiens
  VARIANT (7)...(0): cSNP translation
TVKHGARAEISTVN

SEQ ID NO: 1213 - protein, 14 aa, Homo sapiens
  VARIANT (7)...(0): cSNP translation
ATRATLEKEFGGGH

SEQ ID NO: 1214 - protein, 14 aa, Homo sapiens
  VARIANT (7)...(0): cSNP translation
ATLKKESGGGHIKD

SEQ ID NO: 1215 - protein, 14 aa, Homo sapiens
  VARIANT (7)...(0): cSNP translation
TIKSHSNLPPNNSY

SEQ ID NO: 1216 - protein, 14 aa, Homo sapiens
  VARIANT (7)...(0): cSNP translation
VVEDIDTLDVDTHK

SEQ ID NO: 1217 - protein, 14 aa, Homo sapiens
  VARIANT (7)...(0): cSNP translation
VSIFNLGGMEHHVR

SEQ ID NO: 1218 - protein, 14 aa, Homo sapiens
  VARIANT (7)...(0): cSNP translation
PAQDDRPFYQFEAA

SEQ ID NO: 1219 - protein, 14 aa, Homo sapiens
  VARIANT (7)...(0): cSNP translation
ERLQETGKIIAELN

SEQ ID NO: 1220 - protein, 14 aa, Homo sapiens
  VARIANT (7)...(0): cSNP translation
PENVVFHVGGYPPD

SEQ ID NO: 1221 - protein, 14 aa, Homo sapiens
  VARIANT (7)...(0): cSNP translation
DSVWMEVDDEEDLP

SEQ ID NO: 1222 - protein, 14 aa, Homo sapiens
  VARIANT (7)...(0): cSNP translation
STTGTPLSSAPDPK

SEQ ID NO: 1223 - protein, 14 aa, Homo sapiens
  VARIANT (7)...(0): cSNP translation
QRRLDQFIGKPSLF

SEQ ID NO: 1224 - protein, 14 aa, Homo sapiens
  VARIANT (7)...(0): cSNP translation
PPPWSKYVEYTFTG

SEQ ID NO: 1225 - protein, 14 aa, Homo sapiens
  VARIANT (7)...(0): cSNP translation
TFGFQGKALSSLCA

SEQ ID NO: 1226 - protein, 6 aa, Homo sapiens
  VARIANT (7)...(0): cSNP translation
KLNTSN

SEQ ID NO: 1227 - protein, 14 aa, Homo sapiens
  VARIANT (7)...(0): cSNP translation
IRNAQLRGLIIAPE

SEQ ID NO: 1228 - protein, 14 aa, Homo sapiens
  VARIANT (7)...(0): cSNP translation
GKLVLNQNPVNYFA

SEQ ID NO: 1229 - protein, 14 aa, Homo sapiens
  VARIANT (7)...(0): cSNP translation
EYQVLFGALISPDR

SEQ ID NO: 1230 - protein, 14 aa, Homo sapiens
  VARIANT (7)...(0): cSNP translation
QRDLGYVPLVSWEE

SEQ ID NO: 1231 - protein, 14 aa, Homo sapiens
  VARIANT (7)...(0): cSNP translation
CTASATLSCNDLCE

SEQ ID NO: 1232 - protein, 14 aa, Homo sapiens
  VARIANT (7)...(0): cSNP translation
RPLTTQHPQSGTLK

SEQ ID NO: 1233 - protein, 14 aa, Homo sapiens
  VARIANT (7)...(0): cSNP translation
GSLARAEEAGKLEE

SEQ ID NO: 1234 - protein, 14 aa, Homo sapiens
  VARIANT (7)...(0): cSNP translation
KIIKVKSVKDREDV

SEQ ID NO: 1235 - protein, 14 aa, Homo sapiens
  VARIANT (7)...(0): cSNP translation
ALRSLQSRCLVPGY

SEQ ID NO: 1236 - protein, 14 aa, Homo sapiens
  VARIANT (7)...(0): cSNP translation
ISASSQAPLALRSL

SEQ ID NO: 1237 - protein, 14 aa, Homo sapiens
  VARIANT (7)...(0): cSNP translation
TKNSVMSKLYGDAD

SEQ ID NO: 1238 - protein, 14 aa, Homo sapiens
  VARIANT (7)...(0): cSNP translation
LLRPGSSARVVQCI

SEQ ID NO: 1239 - protein, 14 aa, Homo sapiens
  VARIANT (7)...(0): cSNP translation
CDRSWINDQYDRFV

SEQ ID NO: 1240 - protein, 14 aa, Homo sapiens
  VARIANT (7)...(0): cSNP translation
TGDKRFGCAQCQKR

SEQ ID NO: 1241 - protein, 14 aa, Homo sapiens
  VARIANT (7)...(0): cSNP translation
TSVGPNTVSPSSGP

SEQ ID NO: 1242 - protein, 14 aa, Homo sapiens
  VARIANT (7)...(0): cSNP translation
CEQGFSRKSHLIRH

SEQ ID NO: 1243 - protein, 14 aa, Homo sapiens
  VARIANT (7)...(0): cSNP translation
TLYHHVDGCDVFHL

SEQ ID NO: 1244 - protein, 6 aa, Homo sapiens
  VARIANT (7)...(0): cSNP translation
MALFTP

SEQ ID NO: 1245 - protein, 14 aa, Homo sapiens
  VARIANT (7)...(0): cSNP translation
CINVLVPGFIMVSG

SEQ ID NO: 1246 - protein, 14 aa, Homo sapiens
  VARIANT (7)...(0): cSNP translation
TVSISIWASLQQTQ

SEQ ID NO: 1247 - protein, 14 aa, Homo sapiens
  VARIANT (7)...(0): cSNP translation
SELNQPPELLPQFS

SEQ ID NO: 1248 - protein, 14 aa, Homo sapiens
  VARIANT (7)...(0): cSNP translation
TPQHCSRNNFTMRL

SEQ ID NO: 1249 - protein, 14 aa, Homo sapiens
  VARIANT (7)...(0): cSNP translation
WLKGGEQHSALPEQ

SEQ ID NO: 1250 - protein, 14 aa, Homo sapiens
  VARIANT (7)...(0): cSNP translation
ITGTFKYRKMTLVE

SEQ ID NO: 1251 - protein, 14 aa, Homo sapiens
  VARIANT (7)...(0): cSNP translation
CDQKPCNCPKGDVN

SEQ ID NO: 1252 - protein, 14 aa, Homo sapiens
  VARIANT (7)...(0): cSNP translation
PGLGSPERYSPVHG

SEQ ID NO: 1253 - protein, 14 aa, Homo sapiens
  VARIANT (7)...(0): cSNP translation
GAVLVLYSLPLEFP

SEQ ID NO: 1254 - protein, 14 aa, Homo sapiens
  VARIANT (7)...(0): cSNP translation
IEAESSNLTSVTTE

SEQ ID NO: 1255 - protein, 14 aa, Homo sapiens
  VARIANT (7)...(0): cSNP translation
LTWPADTLHCTECV

SEQ ID NO: 1256 - protein, 14 aa, Homo sapiens
  VARIANT (7)...(0): cSNP translation
LTSSYSLDVSDYKE

SEQ ID NO: 1257 - protein, 14 aa, Homo sapiens
  VARIANT (7)...(0): cSNP translation
KKVEFVPKQLRIMQ

SEQ ID NO: 1258 - protein, 6 aa, Homo sapiens
  VARIANT (7)...(0): cSNP translation
VLQAGA

SEQ ID NO: 1259 - protein, 14 aa, Homo sapiens
  VARIANT (7)...(0): cSNP translation
ESVQQQTEFLNRQL

SEQ ID NO: 1260 - protein, 13 aa, Homo sapiens
  VARIANT (7)...(0): cSNP translation
NPFGPVPGAQIQF

SEQ ID NO: 1261 - protein, 14 aa, Homo sapiens
  VARIANT (7)...(0): cSNP translation
GCVDIAEILLAAKC

SEQ ID NO: 1262 - protein, 14 aa, Homo sapiens
  VARIANT (7)...(0): cSNP translation
SESSIKEKFLKRKG

SEQ ID NO: 1263 - protein, 14 aa, Homo sapiens
  VARIANT (7)...(0): cSNP translation
NLVPVRMFMAHQDL

SEQ ID NO: 1264 - protein, 14 aa, Homo sapiens
  VARIANT (7)...(0): cSNP translation
QRKRLQPQLEERSR

SEQ ID NO: 1265 - protein, 14 aa, Homo sapiens
  VARIANT (7)...(0): cSNP translation
FLYISLTDMFPEMN

SEQ ID NO: 1266 - protein, 14 aa, Homo sapiens
  VARIANT (7)...(0): cSNP translation
GHTLDVLKRKFHYF

SEQ ID NO: 1267 - protein, 14 aa, Homo sapiens
  VARIANT (7)...(0): cSNP translation
GKTVLSLGFTEVMP

SEQ ID NO: 1268 - protein, 14 aa, Homo sapiens
  VARIANT (7)...(0): cSNP translation
LSLIIGHPIAVLMY

SEQ ID NO: 1269 - protein, 14 aa, Homo sapiens
  VARIANT (7)...(0): cSNP translation
QEEQMEPEQQNKDE

SEQ ID NO: 1270 - protein, 14 aa, Homo sapiens
  VARIANT (7)...(0): cSNP translation
EAQRLITQQGLVDG

SEQ ID NO: 1271 - protein, 6 aa, Homo sapiens
  VARIANT (7)...(0): cSNP translation
SPGKCD

SEQ ID NO: 1272 - protein, 14 aa, Homo sapiens
  VARIANT (7)...(0): cSNP translation
LTSSELPQRLKTIG

SEQ ID NO: 1273 - protein, 14 aa, Homo sapiens
  VARIANT (7)...(0): cSNP translation
SHHDPIIKVLSIRG

SEQ ID NO: 1274 - protein, 14 aa, Homo sapiens
  VARIANT (7)...(0): cSNP translation
SSEKISYNPWSLRC

SEQ ID NO: 1275 - protein, 14 aa, Homo sapiens
  VARIANT (7)...(0): cSNP translation
NFKHASSILPITEF

SEQ ID NO: 1276 - protein, 14 aa, Homo sapiens
  VARIANT (7)...(0): cSNP translation
PIAETIKASSNESL

SEQ ID NO: 1277 - protein, 14 aa, Homo sapiens
  VARIANT (7)...(0): cSNP translation
TSLAPASLITMPAT

SEQ ID NO: 1278 - protein, 14 aa, Homo sapiens
  VARIANT (7)...(0): cSNP translation
KEWVDKCDPGALVI

SEQ ID NO: 1279 - protein, 14 aa, Homo sapiens
  VARIANT (7)...(0): cSNP translation
SPRMPSFGFAAEGR

SEQ ID NO: 1280 - protein, 14 aa, Homo sapiens
  VARIANT (7)...(0): cSNP translation
SIIHIISTLLLSTQ

SEQ ID NO: 1281 - protein, 14 aa, Homo sapiens
  VARIANT (7)...(0): cSNP translation
KEELDRSCRECKRK

SEQ ID NO: 1282 - protein, 14 aa, Homo sapiens
  VARIANT (7)...(0): cSNP translation
RDRDREGDRDRDRD

SEQ ID NO: 1283 - protein, 14 aa, Homo sapiens
  VARIANT (7)...(0): cSNP translation
KESELQVTSAASPH

SEQ ID NO: 1284 - protein, 14 aa, Homo sapiens
  VARIANT (7)...(0): cSNP translation
GSSRSHCREERSRR

SEQ ID NO: 1285 - protein, 14 aa, Homo sapiens
  VARIANT (7)...(0): cSNP translation
SAASSVLRREYKPR

SEQ ID NO: 1286 - protein, 14 aa, Homo sapiens
  VARIANT (7)...(0): cSNP translation
DIPIILFGNKSDLV

SEQ ID NO: 1287 - protein, 14 aa, Homo sapiens
  VARIANT (7)...(0): cSNP translation
IRFRQDSNEAVGGF

SEQ ID NO: 1288 - protein, 14 aa, Homo sapiens
  VARIANT (7)...(0): cSNP translation
TTVFEDPYDYMNSL

SEQ ID NO: 1289 - protein, 14 aa, Homo sapiens
  VARIANT (7)...(0): cSNP translation
PRQNSQPPAQVQNG

SEQ ID NO: 1290 - protein, 6 aa, Homo sapiens
  VARIANT (7)...(0): cSNP translation
QQKLWN

SEQ ID NO: 1291 - protein, 14 aa, Homo sapiens
  VARIANT (7)...(0): cSNP translation
AIETQLPEYHKLAR

SEQ ID NO: 1292 - protein, 14 aa, Homo sapiens
  VARIANT (7)...(0): cSNP translation
NKKMGLGDTLEQLN

SEQ ID NO: 1293 - protein, 14 aa, Homo sapiens
  VARIANT (7)...(0): cSNP translation
FSTPEARGEHGLAP

SEQ ID NO: 1294 - protein, 14 aa, Homo sapiens
  VARIANT (7)...(0): cSNP translation
QKFQVDKSNRLLLQ

SEQ ID NO: 1295 - protein, 14 aa, Homo sapiens
  VARIANT (7)...(0): cSNP translation
QQVSLPYIPGNYTV

SEQ ID NO: 1296 - protein, 14 aa, Homo sapiens
  VARIANT (7)...(0): cSNP translation
KEEEQAEKNKLSGK

SEQ ID NO: 1297 - protein, 14 aa, Homo sapiens
  VARIANT (7)...(0): cSNP translation
VSLPKLTNVQLLDT

SEQ ID NO: 1298 - protein, 14 aa, Homo sapiens
  VARIANT (7)...(0): cSNP translation
NVQLLDIDGGFVHS

SEQ ID NO: 1299 - protein, 14 aa, Homo sapiens
  VARIANT (7)...(0): cSNP translation
YQEELRFHYKDMLS

SEQ ID NO: 1300 - protein, 14 aa, Homo sapiens
  VARIANT (7)...(0): cSNP translation
NFPITFTCYAALFC

SEQ ID NO: 1301 - protein, 14 aa, Homo sapiens
  VARIANT (7)...(0): cSNP translation
RDEHLHKMALEQIT

SEQ ID NO: 1302 - protein, 14 aa, Homo sapiens
  VARIANT (7)...(0): cSNP translation
IATKEEISLLEAWK

SEQ ID NO: 1303 - protein, 14 aa, Homo sapiens
  VARIANT (7)...(0): cSNP translation
FTWLSPEGEYQKWN

SEQ ID NO: 1304 - protein, 14 aa, Homo sapiens
  VARIANT (7)...(0): cSNP translation
GPLPENVTWLSPGG

SEQ ID NO: 1305 - protein, 14 aa, Homo sapiens
  VARIANT (7)...(0): cSNP translation
VFNSDESSWHLVED

SEQ ID NO: 1306 - protein, 14 aa, Homo sapiens
  VARIANT (7)...(0): cSNP translation
RKSFVFGLNECASS

SEQ ID NO: 1307 - protein, 6 aa, Homo sapiens
  VARIANT (7)...(0): cSNP translation
GQEYHL

SEQ ID NO: 1308 - protein, 14 aa, Homo sapiens
  VARIANT (7)...(0): cSNP translation
KDGAPWFGRHYCES

SEQ ID NO: 1309 - protein, 14 aa, Homo sapiens
  VARIANT (7)...(0): cSNP translation
YSSTDTLYPGSLPP

SEQ ID NO: 1310 - protein, 14 aa, Homo sapiens
  VARIANT (7)...(0): cSNP translation
ILNSKDQLQVENDA

SEQ ID NO: 1311 - protein, 6 aa, Homo sapiens
  VARIANT (7)...(0): cSNP translation
NSKDHL

SEQ ID NO: 1312 - protein, 14 aa, Homo sapiens
  VARIANT (7)...(0): cSNP translation
PGTDRTANVKYRQV

SEQ ID NO: 1313 - protein, 14 aa, Homo sapiens
  VARIANT (7)...(0): cSNP translation
FTKIKTSDHQYMEG

SEQ ID NO: 1314 - protein, 14 aa, Homo sapiens
  VARIANT (7)...(0): cSNP translation
AGLDAQMVMQDDAI

SEQ ID NO: 1315 - protein, 14 aa, Homo sapiens
  VARIANT (7)...(0): cSNP translation
VGGWAGFDAQVVMQ

SEQ ID NO: 1316 - protein, 14 aa, Homo sapiens
  VARIANT (7)...(0): cSNP translation
ITADQLSGVGGWAG

SEQ ID NO: 1317 - protein, 14 aa, Homo sapiens
  VARIANT (7)...(0): cSNP translation
VQPQINMTADQLLG

SEQ ID NO: 1318 - protein, 14 aa, Homo sapiens
  VARIANT (7)...(0): cSNP translation
NYKDQLPQLNVRVL

SEQ ID NO: 1319 - protein, 14 aa, Homo sapiens
  VARIANT (7)...(0): cSNP translation
LMKFYLLLTGIPVI

SEQ ID NO: 1320 - protein, 14 aa, Homo sapiens
  VARIANT (7)...(0): cSNP translation
ALTALSGRRAGTRL

SEQ ID NO: 1321 - protein, 14 aa, Homo sapiens
  VARIANT (7)...(0): cSNP translation
HLAAERGAEIRSLC

SEQ ID NO: 1322 - protein, 14 aa, Homo sapiens
  VARIANT (7)...(0): cSNP translation
TIFLSKFQTDVREK

SEQ ID NO: 1323 - protein, 14 aa, Homo sapiens
  VARIANT (7)...(0): cSNP translation
ALSYGFHGCHCGVG

SEQ ID NO: 1324 - protein, 14 aa, Homo sapiens
  VARIANT (7)...(0): cSNP translation
IACPETGTPAVITC

SEQ ID NO: 1325 - protein, 14 aa, Homo sapiens
  VARIANT (7)...(0): cSNP translation
VCPIRDSCRWVIDG

SEQ ID NO: 1326 - protein, 14 aa, Homo sapiens
  VARIANT (7)...(0): cSNP translation
LSAWPEPDQASRCL

SEQ ID NO: 1327 - protein, 14 aa, Homo sapiens
  VARIANT (7)...(0): cSNP translation
ISFIFRKGRKNSGI

SEQ ID NO: 1328 - protein, 14 aa, Homo sapiens
  VARIANT (7)...(0): cSNP translation
HEIMGPEKKHLDYL

SEQ ID NO: 1329 - protein, 14 aa, Homo sapiens
  VARIANT (7)...(0): cSNP translation
EIMGPKNKHLDYLI

SEQ ID NO: 1330 - protein, 14 aa, Homo sapiens
  VARIANT (7)...(0): cSNP translation
EMNVNISQLADSLF

SEQ ID NO: 1331 - protein, 13 aa, Homo sapiens
  VARIANT (7)...(0): cSNP translation
EQSVQSQPEEEDE

SEQ ID NO: 1332 - protein, 14 aa, Homo sapiens
  VARIANT (7)...(0): cSNP translation
RTRACFRQWLCRLH

SEQ ID NO: 1333 - protein, 14 aa, Homo sapiens
  VARIANT (7)...(0): cSNP translation
ACFTQWPCRLHNEV

SEQ ID NO: 1334 - protein, 14 aa, Homo sapiens
  VARIANT (7)...(0): cSNP translation
MVTSSAMSSLACII

SEQ ID NO: 1335 - protein, 14 aa, Homo sapiens
  VARIANT (7)...(0): cSNP translation
VAMLLPNWKTSSYV

SEQ ID NO: 1336 - protein, 14 aa, Homo sapiens
  VARIANT (7)...(0): cSNP translation
LQPSTSRDQPVTSE

SEQ ID NO: 1337 - protein, 14 aa, Homo sapiens
  VARIANT (7)...(0): cSNP translation
STSTDQLVTSEPTS

SEQ ID NO: 1338 - protein, 14 aa, Homo sapiens
  VARIANT (7)...(0): cSNP translation
TDQPVTPEPTSQAT

SEQ ID NO: 1339 - protein, 14 aa, Homo sapiens
  VARIANT (7)...(0): cSNP translation
TSEPTSRATRGRKN

SEQ ID NO: 1340 - protein, 14 aa, Homo sapiens
  VARIANT (7)...(0): cSNP translation
VHQEATARLSGSGN

SEQ ID NO: 1341 - protein, 14 aa, Homo sapiens
  VARIANT (7)...(0): cSNP translation
RIKMEEYALLSDPV

SEQ ID NO: 1342 - protein, 14 aa, Homo sapiens
  VARIANT (7)...(0): cSNP translation
RARRSNCRRQEGIK

SEQ ID NO: 1343 - protein, 14 aa, Homo sapiens
  VARIANT (7)...(0): cSNP translation
GWRAINSSMAAPSS

SEQ ID NO: 1344 - protein, 14 aa, Homo sapiens
  VARIANT (7)...(0): cSNP translation
EPLNSRGNKLHFAF

SEQ ID NO: 1345 - protein, 14 aa, Homo sapiens
  VARIANT (7)...(0): cSNP translation
INPLGDWIINAFFP

SEQ ID NO: 1346 - protein, 14 aa, Homo sapiens
  VARIANT (7)...(0): cSNP translation
SREDFQGIPELAIN

SEQ ID NO: 1347 - protein, 14 aa, Homo sapiens
  VARIANT (7)...(0): cSNP translation
LEQEYENKLRAELV

SEQ ID NO: 1348 - protein, 14 aa, Homo sapiens
  VARIANT (7)...(0): cSNP translation
EVSADGETITVTFF

SEQ ID NO: 1349 - protein, 14 aa, Homo sapiens
  VARIANT (7)...(0): cSNP translation
AKKEMVSSKLPNSV

SEQ ID NO: 1350 - protein, 14 aa, Homo sapiens
  VARIANT (7)...(0): cSNP translation
IQPDGSGSAVLWCD

SEQ ID NO: 1351 - protein, 14 aa, Homo sapiens
  VARIANT (7)...(0): cSNP translation
KWFEVKHISTEEIS

SEQ ID NO: 1352 - protein, 14 aa, Homo sapiens
  VARIANT (7)...(0): cSNP translation
KSHFQATHSESSDT

SEQ ID NO: 1353 - protein, 14 aa, Homo sapiens
  VARIANT (7)...(0): cSNP translation
TMGSTEARVDYMGS

SEQ ID NO: 1354 - protein, 14 aa, Homo sapiens
  VARIANT (7)...(0): cSNP translation
SKEAIHIQLLEKQK

SEQ ID NO: 1355 - protein, 6 aa, Homo sapiens
  VARIANT (7)...(0): cSNP translation
VCGDAS

SEQ ID NO: 1356 - protein, 14 aa, Homo sapiens
  VARIANT (7)...(0): cSNP translation
QAQAQSYCSCSTVS

SEQ ID NO: 1357 - protein, 14 aa, Homo sapiens
  VARIANT (7)...(0): cSNP translation
EEVKVSWTRLPTSC

SEQ ID NO: 1358 - protein, 14 aa, Homo sapiens
  VARIANT (7)...(0): cSNP translation
KPITRKGVGHRMGG

SEQ ID NO: 1359 - protein, 14 aa, Homo sapiens
  VARIANT (7)...(0): cSNP translation
RSCSHPSQLHRLVF

SEQ ID NO: 1360 - protein, 14 aa, Homo sapiens
  VARIANT (7)...(0): cSNP translation
AGTYPRREEYRRGI

SEQ ID NO: 1361 - protein, 14 aa, Homo sapiens
  VARIANT (7)...(0): cSNP translation
TISPLTLVSVSPAN

SEQ ID NO: 1362 - protein, 14 aa, Homo sapiens
  VARIANT (7)...(0): cSNP translation
MGSHEPMISPLTPV

SEQ ID NO: 1363 - protein, 14 aa, Homo sapiens
  VARIANT (8)...(0): cSNP translation
RIGLGLGGRWAWRL

SEQ ID NO: 1364 - protein, 14 aa, Homo sapiens
  VARIANT (8)...(0): cSNP translation
VMRIGLGWAGRWAW

SEQ ID NO: 1365 - protein, 14 aa, Homo sapiens
  VARIANT (8)...(0): cSNP translation
GLTQNKACQKTLSM

SEQ ID NO: 1366 - protein, 14 aa, Homo sapiens
  VARIANT (7)...(0): cSNP translation
VQWVAPRGCCYGSS

SEQ ID NO: 1367 - protein, 9 aa, Homo sapiens
  VARIANT (7)...(0): cSNP translation
PGNNRKCMN

SEQ ID NO: 1368 - protein, 14 aa, Homo sapiens
  VARIANT (7)...(0): cSNP translation
SVGALEANSRRKLA

SEQ ID NO: 1369 - protein, 14 aa, Homo sapiens
  VARIANT (7)...(0): cSNP translation
CQGDSGARWCVRTK

SEQ ID NO: 1370 - protein, 14 aa, Homo sapiens
  VARIANT (7)...(0): cSNP translation
CQGDSGARWCVRTK

SEQ ID NO: 1371 - protein, 14 aa, Homo sapiens
  VARIANT (8)...(0): cSNP translation
IETYFSKTTKTMSI

SEQ ID NO: 1372 - protein, 14 aa, Homo sapiens
  VARIANT (8)...(0): cSNP translation
PLSGALAQSLRPSK

SEQ ID NO: 1373 - protein, 14 aa, Homo sapiens
  VARIANT (7)...(0): cSNP translation
WMRNRRTVPRQPSE

SEQ ID NO: 1374 - protein, 12 aa, Homo sapiens
  VARIANT (8)...(0): cSNP translation
FSGRLKAEGTSC

SEQ ID NO: 1375 - protein, 14 aa, Homo sapiens
  VARIANT (8)...(0): cSNP translation
LHRAFSVSYSTPKI

SEQ ID NO: 1376 - protein, 14 aa, Homo sapiens
  VARIANT (7)...(0): cSNP translation
SKVLEEGRPPRRAC

SEQ ID NO: 1377 - protein, 14 aa, Homo sapiens
  VARIANT (8)...(0): cSNP translation
AEEGLRECSAAGGS

SEQ ID NO: 1378 - protein, 14 aa, Homo sapiens
  VARIANT (8)...(0): cSNP translation
ELQRSRRSATRTWR

SEQ ID NO: 1379 - protein, 14 aa, Homo sapiens
  VARIANT (8)...(0): cSNP translation
EDVEALAPSTRRRR

SEQ ID NO: 1380 - protein, 14 aa, Homo sapiens
  VARIANT (7)...(0): cSNP translation
EINCRRRTMGTSSP

SEQ ID NO: 1381 - protein, 14 aa, Homo sapiens
  VARIANT (7)...(0): cSNP translation
GMEHHVAPASPKWS

SEQ ID NO: 1382 - protein, 9 aa, Homo sapiens
  VARIANT (10)...(0): cSNP translation
VAAEALLKK

SEQ ID NO: 1383 - protein, 14 aa, Homo sapiens
  VARIANT (7)...(0): cSNP translation
GCPKMGTMLTNLRG

SEQ ID NO: 1384 - protein, 14 aa, Homo sapiens
  VARIANT (7)...(0): cSNP translation
PCPAEGSPKWGTML

SEQ ID NO: 1385 - protein, 14 aa, Homo sapiens
  VARIANT (7)...(0): cSNP translation
AHTAAEGAGGWGAA

SEQ ID NO: 1386 - protein, 13 aa, Homo sapiens
  VARIANT (7)...(0): cSNP translation
LQETLLGLFGLWC

SEQ ID NO: 1387 - protein, 14 aa, Homo sapiens
  VARIANT (7)...(0): cSNP translation
DKAEKTKKKKKKRK

SEQ ID NO: 1388 - protein, 14 aa, Homo sapiens
  VARIANT (7)...(0): cSNP translation
KKECYYISMTPVSV

SEQ ID NO: 1389 - protein, 8 aa, Homo sapiens
  VARIANT (7)...(0): cSNP translation
ESLIDEER

SEQ ID NO: 1390 - protein, 14 aa, Homo sapiens
  VARIANT (7)...(0): cSNP translation
EYKLVVGAPAVWAR

SEQ ID NO: 1391 - protein, 14 aa, Homo sapiens
  VARIANT (8)...(0): cSNP translation
EYKLVVVAPAVWAR

SEQ ID NO: 1392 - protein, 14 aa, Homo sapiens
  VARIANT (7)...(0): cSNP translation
YKLVVVAPAVWARV

SEQ ID NO: 1393 - protein, 14 aa, Homo sapiens
  VARIANT (7)...(0): cSNP translation
YDADAGRMTCHCWS

SEQ ID NO: 1394 - protein, 10 aa, Homo sapiens
  VARIANT (9)...(0): cSNP translation
MRYDADAGGE

SEQ ID NO: 1395 - protein, 14 aa, Homo sapiens
  VARIANT (8)...(0): cSNP translation
YIDIQLRLLPSHRT

SEQ ID NO: 1396 - protein, 14 aa, Homo sapiens
  VARIANT (7)...(0): cSNP translation
APKSACVCAQADFE

SEQ ID NO: 1397 - protein, 9 aa, Homo sapiens
  VARIANT (8)...(0): cSNP translation
GVSGVKPQG

SEQ ID NO: 1398 - protein, 14 aa, Homo sapiens
  VARIANT (7)...(0): cSNP translation
LKPVPVGKRTRASS

SEQ ID NO: 1399 - protein, 14 aa, Homo sapiens
  VARIANT (7)...(0): cSNP translation
DRVPLRTRTSPLKR

SEQ ID NO: 1400 - protein, 14 aa, Homo sapiens
  VARIANT (7)...(0): cSNP translation
LENSQMKSACCCKP

SEQ ID NO: 1401 - protein, 14 aa, Homo sapiens
  VARIANT (9)...(0): cSNP translation
LLAMLQGPGPWLRP

SEQ ID NO: 1402 - protein, 14 aa, Homo sapiens
  VARIANT (7)...(0): cSNP translation
SELRGGLTGASTSS

SEQ ID NO: 1403 - protein, 14 aa, Homo sapiens
  VARIANT (7)...(0): cSNP translation
VALSSAGVLSPMVA

SEQ ID NO: 1404 - protein, 14 aa, Homo sapiens
  VARIANT (9)...(0): cSNP translation
LVKLKLKKIPWMTF

SEQ ID NO: 1405 - protein, 11 aa, Homo sapiens
  VARIANT (7)...(0): cSNP translation
SNSISVMGVSR

SEQ ID NO: 1406 - protein, 14 aa, Homo sapiens
  VARIANT (8)...(0): cSNP translation
TEWSQWSNVTSHVG

SEQ ID NO: 1407 - protein, 12 aa, Homo sapiens
  VARIANT (8)...(0): cSNP translation
YRRQGLPITIGE

SEQ ID NO: 1408 - protein, 10 aa, Homo sapiens
  VARIANT (8)...(0): cSNP translation
VGDACDSALK

SEQ ID NO: 1409 - protein, 13 aa, Homo sapiens
  VARIANT (7)...(0): cSNP translation
SVEPERDLTFLLT

SEQ ID NO: 1410 - protein, 14 aa, Homo sapiens
  VARIANT (7)...(0): cSNP translation
LQIMLQAESATRTE

SEQ ID NO: 1411 - protein, 8 aa, Homo sapiens
  VARIANT (7)...(0): cSNP translation
FGFSSGPS

SEQ ID NO: 1412 - protein, 14 aa, Homo sapiens
  VARIANT (10)...(0): cSNP translation
PEKQLVEKKVLTKQ

SEQ ID NO: 1413 - protein, 13 aa, Homo sapiens
  VARIANT (9)...(0): cSNP translation
VVVMGPPKLERAL

SEQ ID NO: 1414 - protein, 14 aa, Homo sapiens
  VARIANT (7)...(0): cSNP translation
FSEDDPWRPLSIGP

SEQ ID NO: 1415 - protein, 14 aa, Homo sapiens
  VARIANT (8)...(0): cSNP translation
NQSQELQRSWRTAG

SEQ ID NO: 1416 - protein, 14 aa, Homo sapiens
  VARIANT (8)...(0): cSNP translation
NHMVQQDISPRPLH

SEQ ID NO: 1417 - protein, 14 aa, Homo sapiens
  VARIANT (8)...(0): cSNP translation
KWPTLQDWPVLPWR

SEQ ID NO: 1418 - protein, 14 aa, Homo sapiens
  VARIANT (7)...(0): cSNP translation
FVGRFFRATMATQL

SEQ ID NO: 1419 - protein, 9 aa, Homo sapiens
  VARIANT (9)...(0): cSNP translation
QIHRIRHFT

SEQ ID NO: 1420 - protein, 14 aa, Homo sapiens
  VARIANT (7)...(0): cSNP translation
TLEEGNQQTRSPVP

SEQ ID NO: 1421 - protein, 14 aa, Homo sapiens
  VARIANT (8)...(0): cSNP translation
ATLEEGNQQTRSPV

SEQ ID NO: 1422 - protein, 14 aa, Homo sapiens
  VARIANT (7)...(0): cSNP translation
ILNQPTLRLLPMPE

SEQ ID NO: 1423 - protein, 14 aa, Homo sapiens
  VARIANT (7)...(0): cSNP translation
VNCSAVCASSSVPC

SEQ ID NO: 1424 - protein, 14 aa, Homo sapiens
  VARIANT (7)...(0): cSNP translation
AAPLKIKLISMRLQ

SEQ ID NO: 1425 - protein, 14 aa, Homo sapiens
  VARIANT (7)...(0): cSNP translation
EEVEEEGEKRMFSP

SEQ ID NO: 1426 - protein, 14 aa, Homo sapiens
  VARIANT (9)...(0): cSNP translation
RVGTPSQGHFFEGA

SEQ ID NO: 1427 - protein, 14 aa, Homo sapiens
  VARIANT (8)...(0): cSNP translation
PCAVLRPLGLWSPS

SEQ ID NO: 1428 - protein, 14 aa, Homo sapiens
  VARIANT (7)...(0): cSNP translation
LGYTPQRPVKCASC

SEQ ID NO: 1429 - protein, 14 aa, Homo sapiens
  VARIANT (9)...(0): cSNP translation
FQAAIEKKNSCIST

SEQ ID NO: 1430 - protein, 4 aa, Homo sapiens
LLYW

SEQ ID NO: 1431 - protein, 14 aa, Homo sapiens
  VARIANT (7)...(0): cSNP translation
FCNGQRSGSPGRQI

SEQ ID NO: 1432 - protein, 14 aa, Homo sapiens
  VARIANT (7)...(0): cSNP translation
MKIQYPAWPRASTV

SEQ ID NO: 1433 - protein, 14 aa, Homo sapiens
  VARIANT (7)...(0): cSNP translation
MKIQYPAWPRASTV

SEQ ID NO: 1434 - protein, 14 aa, Homo sapiens
  VARIANT (9)...(0): cSNP translation
EPLEMARPLAHPVA

SEQ ID NO: 1435 - protein, 1 aa, Homo sapiens
S

SEQ ID NO: 1436 - protein, 14 aa, Homo sapiens
  VARIANT (7)...(0): cSNP translation
RLDRERKKDKNERG

SEQ ID NO: 1437 - protein, 8 aa, Homo sapiens
  VARIANT (7)...(0): cSNP translation
ESKRSVKL

SEQ ID NO: 1438 - protein, 12 aa, Homo sapiens
  VARIANT (8)...(0): cSNP translation
DISICQECPAWR

SEQ ID NO: 1439 - protein, 14 aa, Homo sapiens
  VARIANT (8)...(0): cSNP translation
SLFSLKQSSRRTKT

SEQ ID NO: 1440 - protein, 9 aa, Homo sapiens
  VARIANT (7)...(0): cSNP translation
TSLLQGTPT

SEQ ID NO: 1441 - protein, 14 aa, Homo sapiens
  VARIANT (8)...(0): cSNP translation
IILIVELAGSRPAS

SEQ ID NO: 1442 - protein, 14 aa, Homo sapiens
  VARIANT (7)...(0): cSNP translation
ILIVELSGSRPASP

SEQ ID NO: 1443 - protein, 14 aa, Homo sapiens
  VARIANT (8)...(0): cSNP translation
NTQQQQQNYIRWSL

SEQ ID NO: 1444 - protein, 8 aa, Homo sapiens
  VARIANT (7)...(0): cSNP translation
TQQQQQLH

SEQ ID NO: 1445 - protein, 14 aa, Homo sapiens
  VARIANT (7)...(0): cSNP translation
YPAHAFWRPSSGVS

SEQ ID NO: 1446 - protein, 6 aa, Homo sapiens
  VARIANT (7)...(0): cSNP translation
GAYAQA

SEQ ID NO: 1447 - protein, 10 aa, Homo sapiens
  VARIANT (7)...(0): cSNP translation
STALRADSTG

SEQ ID NO: 1448 - protein, 14 aa, Homo sapiens
  VARIANT (7)...(0): cSNP translation
RVLILDTFTCLLCL

SEQ ID NO: 1449 - protein, 11 aa, Homo sapiens
  VARIANT (8)...(0): cSNP translation
YRQVDHFPQIH

SEQ ID NO: 1450 - protein, 14 aa, Homo sapiens
  VARIANT (7)...(0): cSNP translation
KLLVCNMMDVSPMA

SEQ ID NO: 1451 - protein, 14 aa, Homo sapiens
  VARIANT (7)...(0): cSNP translation
DWNSSKTTVPLNMP

SEQ ID NO: 1452 - protein, 14 aa, Homo sapiens
  VARIANT (7)...(0): cSNP translation
LSEAPGSLPQPLSH

SEQ ID NO: 1453 - protein, 14 aa, Homo sapiens
  VARIANT (8)...(0): cSNP translation
TIKSAVASGISLPR

SEQ ID NO: 1454 - protein, 14 aa, Homo sapiens
  VARIANT (8)...(0): cSNP translation
PDRVGRQSLKSSLE

SEQ ID NO: 1455 - protein, 14 aa, Homo sapiens
  VARIANT (8)...(0): cSNP translation
VCTARSPSVRSARS

SEQ ID NO: 1456 - protein, 6 aa, Homo sapiens
  VARIANT (7)...(0): cSNP translation
NQEGDF

SEQ ID NO: 1457 - protein, 14 aa, Homo sapiens
  VARIANT (8)...(0): cSNP translation
LQVPAVTGLTPQPV

SEQ ID NO: 1458 - protein, 14 aa, Homo sapiens
  VARIANT (8)...(0): cSNP translation
SVQRVRQSVKNLIK

SEQ ID NO: 1459 - protein, 14 aa, Homo sapiens
  VARIANT (7)...(0): cSNP translation
TAEEMYIYLGNMDL

SEQ ID NO: 1460 - protein, 14 aa, Homo sapiens
  VARIANT (8)...(0): cSNP translation
AHQGNLAPVFIAMQ

SEQ ID NO: 1461 - protein, 14 aa, Homo sapiens
  VARIANT (7)...(0): cSNP translation
PGEHTPCWPLPRPS

SEQ ID NO: 1462 - protein, 14 aa, Homo sapiens
  VARIANT (7)...(0): cSNP translation
RMLDVLGLSTSCRC

SEQ ID NO: 1463 - protein, 14 aa, Homo sapiens
  VARIANT (8)...(0): cSNP translation
VDELPVQAGAATGS

SEQ ID NO: 1464 - protein, 14 aa, Homo sapiens
  VARIANT (7)...(0): cSNP translation
AYHSGYEPTAPSTG

SEQ ID NO: 1465 - protein, 14 aa, Homo sapiens
  VARIANT (8)...(0): cSNP translation
VMNDLSGEPWTRRP

SEQ ID NO: 1466 - protein, 14 aa, Homo sapiens
  VARIANT (8)...(0): cSNP translation
RKQAVRLRRIFSAI

SEQ ID NO: 1467 - protein, 8 aa, Homo sapiens
  VARIANT (8)...(0): cSNP translation
IDALRGRA

SEQ ID NO: 1468 - protein, 11 aa, Homo sapiens
  VARIANT (7)...(0): cSNP translation
SCRFREATWAT
